United States Patent Application Publication US 2022/0211063 A1 - sequence listing, part 16

SEQ ID NO: 55 - DNA, 8605616 bp, Penicillium roqueforti (residues 1,721,125-3,442,248 of 8,605,616)
  misc_feature (89143)..(89590): n is a, c, g, or t
  misc_feature (91422)..(91652): n is a, c, g, or t
  misc_feature (329890)..(330026): n is a, c, g, or t
  misc_feature (430777)..(431108): n is a, c, g, or t
  misc_feature (461660)..(461676): n is a, c, g, or t
  misc_feature (496393)..(496572): n is a, c, g, or t
  misc_feature (531997)..(532091): n is a, c, g, or t
  misc_feature (539747)..(539882): n is a, c, g, or t
  misc_feature (569530)..(569734): n is a, c, g, or t
  misc_feature (649047)..(649183): n is a, c, g, or t
  misc_feature (691108)..(691170): n is a, c, g, or t
  misc_feature (866493)..(866657): n is a, c, g, or t
  misc_feature (1032404)..(1091803): n is a, c, g, or t
  misc_feature (1092490)..(1092701): n is a, c, g, or t
  misc_feature (1210158)..(1210370): n is a, c, g, or t
  misc_feature (1240516)..(1246788): n is a, c, g, or t
  misc_feature (1247715)..(1253647): n is a, c, g, or t
  misc_feature (1258266)..(1372265): n is a, c, g, or t
  misc_feature (1374099)..(1374507): n is a, c, g, or t
  misc_feature (1457506)..(1457792): n is a, c, g, or t
  misc_feature (1505319)..(1505491): n is a, c, g, or t
  misc_feature (1513190)..(1513352): n is a, c, g, or t
  misc_feature (1624032)..(1624233): n is a, c, g, or t
  misc_feature (1669142)..(1669347): n is a, c, g, or t
  misc_feature (1761210)..(1761436): n is a, c, g, or t
  misc_feature (1817747)..(1926046): n is a, c, g, or t
  misc_feature (1933147)..(1933397): n is a, c, g, or t
  misc_feature (1963959)..(1964336): n is a, c, g, or t
  misc_feature (2150494)..(2150592): n is a, c, g, or t
  misc_feature (2196724)..(2196932): n is a, c, g, or t
  misc_feature (2250718)..(2250774): n is a, c, g, or t
  misc_feature (2391514)..(2391805): n is a, c, g, or t
  misc_feature (2493520)..(2493751): n is a, c, g, or t
  misc_feature (2532126)..(2532403): n is a, c, g, or t
  misc_feature (2536272)..(2536513): n is a, c, g, or t
  misc_feature (2786514)..(2786770): n is a, c, g, or t
  misc_feature (2859475)..(2859766): n is a, c, g, or t
  misc_feature (2873886)..(2874990): n is a, c, g, or t
  misc_feature (2881507)..(2881812): n is a, c, g, or t
  misc_feature (2897061)..(2897239): n is a, c, g, or t
  misc_feature (3050629)..(3051353): n is a, c, g, or t
  misc_feature (3057144)..(3057395): n is a, c, g, or t
  misc_feature (3069494)..(3069869): n is a, c, g, or t
  misc_feature (3075725)..(3076099): n is a, c, g, or t
  misc_feature (3305006)..(3305103): n is a, c, g, or t
  misc_feature (3318292)..(3318616): n is a, c, g, or t
  misc_feature (3502594)..(3502708): n is a, c, g, or t
  misc_feature (3537879)..(3538462): n is a, c, g, or t
  misc_feature (3783308)..(3783522): n is a, c, g, or t
  misc_feature (3992172)..(3992290): n is a, c, g, or t
  misc_feature (4005072)..(4005335): n is a, c, g, or t
  misc_feature (4027270)..(4027470): n is a, c, g, or t
  misc_feature (4058374)..(4058520): n is a, c, g, or t
  misc_feature (4267290)..(4267327): n is a, c, g, or t
  misc_feature (4352793)..(4353255): n is a, c, g, or t
  misc_feature (4361792)..(4361944): n is a, c, g, or t
  misc_feature (4393710)..(4393943): n is a, c, g, or t
  misc_feature (4451442)..(4451579): n is a, c, g, or t
  misc_feature (4461471)..(4461717): n is a, c, g, or t
  misc_feature (4481177)..(4481295): n is a, c, g, or t
  misc_feature (4533818)..(4533955): n is a, c, g, or t
  misc_feature (4590078)..(4590306): n is a, c, g, or t
  misc_feature (4668900)..(4669232): n is a, c, g, or t
  misc_feature (4737074)..(4737168): n is a, c, g, or t
  misc_feature (4766696)..(4766893): n is a, c, g, or t
  misc_feature (4834476)..(4834783): n is a, c, g, or t
  misc_feature (4927466)..(4928039): n is a, c, g, or t
  misc_feature (4945079)..(4945229): n is a, c, g, or t
  misc_feature (5082499)..(5082647): n is a, c, g, or t
  misc_feature (5112540)..(5113261): n is a, c, g, or t
  misc_feature (5314617)..(5314810): n is a, c, g, or t
  misc_feature (5372550)..(5372977): n is a, c, g, or t
  misc_feature (5458853)..(5458964): n is a, c, g, or t
  misc_feature (5480164)..(5480337): n is a, c, g, or t
  misc_feature (5535306)..(5535320): n is a, c, g, or t
  misc_feature (5567454)..(5567593): n is a, c, g, or t
  misc_feature (5598682)..(5598895): n is a, c, g, or t
  misc_feature (5726706)..(5726784): n is a, c, g, or t
  misc_feature (5743217)..(5743685): n is a, c, g, or t
  misc_feature (5807375)..(5807461): n is a, c, g, or t
  misc_feature (5919721)..(5920399): n is a, c, g, or t
  misc_feature (5921713)..(5922019): n is a, c, g, or t
  misc_feature (5942595)..(5942874): n is a, c, g, or t
  misc_feature (6011060)..(6011355): n is a, c, g, or t
  misc_feature (6324898)..(6325216): n is a, c, g, or t
  misc_feature (6397315)..(6397426): n is a, c, g, or t
  misc_feature (6604582)..(6604752): n is a, c, g, or t
  misc_feature (6843517)..(6849268): n is a, c, g, or t
  misc_feature (6859623)..(6860263): n is a, c, g, or t
  misc_feature (6914980)..(6915767): n is a, c, g, or t
  misc_feature (6919071)..(6923941): n is a, c, g, or t
  misc_feature (6950390)..(6950526): n is a, c, g, or t
  misc_feature (7009957)..(7010194): n is a, c, g, or t
  misc_feature (7088551)..(7088774): n is a, c, g, or t
  misc_feature (7280841)..(7281020): n is a, c, g, or t
  misc_feature (7435200)..(7435325): n is a, c, g, or t
  misc_feature (7579890)..(7580210): n is a, c, g, or t
  misc_feature (7597887)..(7598036): n is a, c, g, or t
  misc_feature (7639101)..(7639217): n is a, c, g, or t
  misc_feature (7648311)..(7648518): n is a, c, g, or t
  misc_feature (8007231)..(8007417): n is a, c, g, or t
  misc_feature (8052974)..(8053439): n is a, c, g, or t
  misc_feature (8129120)..(8129535): n is a, c, g, or t
  misc_feature (8133830)..(8134018): n is a, c, g, or t
  misc_feature (8188105)..(8188254): n is a, c, g, or t
  misc_feature (8239788)..(8240259): n is a, c, g, or t
  misc_feature (8245696)..(8245807): n is a, c, g, or t
  misc_feature (8304973)..(8305563): n is a, c, g, or t
  misc_feature (8313929)..(8318046): n is a, c, g, or t
  misc_feature (8345244)..(8345345): n is a, c, g, or t
  misc_feature (8407624)..(8407830): n is a, c, g, or t
  misc_feature (8424515)..(8424640): n is a, c, g, or t
  misc_feature (8481408)..(8481631): n is a, c, g, or t
  misc_feature (8596929)..(8597175): n is a, c, g, or t
gtgcaagtccgattgtttggatgttcttgaatcgatccatacattcccgaagtcgatcactgaatgcttctgattccagcaggttgcgattatccgcaatcatatctttttggaccgtacgccggctttccagctcgtcgcctttgacttgccggcagctttttgacgatatagatatcataccgaggggcccttcagcgccatcgaataccacagggatcatccatagctcttgaacgtgctcgcggagaccatttgacttagataactcttccagttcgtggagactttcgtttgtcgcaatgaaacagatttttcggtaaaaggtcttcgcaaaattctccagtgagcttttatacaatgcgcggcatgataacctcagagcgaccaattcctgataatccaaatggtcatatatctttgagatcaattccacgggcaaggctgcaatggacattttggctgcgtgcgcgacgtttcgagattgagaacaataataaccaaaaagctcggtttattatccgcagaaataagtaggaatcgtagaagaattgcttttcaatttcaagttccgaaattcacggggaaaaaaaacatggagttcagtgaccaggaatggcggacaatggtgtctgccagaatttgcgcgaggtagaaagcatttcaaaggaaaagaggaacaggagcagaggcgaggattgtgattccaaacaaggactagccctggagcactacttagtaagggatactgcacacaaagtaggcagtccgtccggtacctgggacaggtactgataccggttggtcgtcccggtatcaccacccaaccgagaaatgcgcactgcaagtttaatatacgcactgcaaacacgtgaacatttcaacatttagttagttagaggtaatcaacgtactgacataatacatgaaaaaaagggccgtcctgtttatctgtctttggtacaagcccaactcacctctcttagcacccattgaacacgaaaagctggagccacgataggccttttaactctggtacaaagtgccaatctatcacacctcctggcattcagaacgacagctttcatcgcgtattggatctcggtctacatatatcgagtcactctacatccgctcgcgaaatttcctggcccgaagcttacaggcgcgaccttctggtacaagttctactacaatctatttccccacaaactgcgctttctctggaaaatcgaagacctctataatcagtacggaccaatcgtacgaatcaatccactccacatccatatccgagacccggagtatcttgacgacatctacactagcggacgccgcaagcgcaatcgcaatgagtggtttttccattcctccgtccgatgggatggtcattattcaatatagtcgatcatgacgtccagcgggtgaggcgcgctacgaagggcgcgctacgcttagcccattcttcagcaagcggtcaattcaagctctggaggaccgcgtcgtagataagatcgatattttggtagatcgaatcgcagaagcccgtcagaccggagaaaccgtgaacttgctctttgctgcaggtactctgactatatatataatctctgcttatacatttggaaaagattggaataagttgggtgagcccgactaggccgaggaggagctcgagggctacgccaagatggcgcagataggaccttttactcgtcaattcctataggtagccaaagcggtcattatattgcttctacctaagttagtgacgaagctcagtccagctgctacgcttgtactatggaacagagccctgttcaaggacatgatctagactgcagtcgaagaagaaaagactagtcagcttgaaaaatctgtatcctagtctatattccaggatatccttcagagcaacctactgcccagtgacaaaacccctgctcgcctttcagcggaggcaggtttgcttgtcatggggggaactgaaacgaccgcgagatctttagccgtcattttattcctgcttcttgacaccccgcatgtcttagatcgagtaaggaaggaactggcacagcatatgccccggcctgactcccgcatttcacttgctgagctagaagccattccttatttcgtgagttgctgctgacatcagaatgattcccataacgtcatatgtattaaccaagtcctctagtctgctatgatcaccgaaggcgtgaggctatctcacgttgtttcgagttgtataccaagatacgcccccgaggaagagctcaaatacaaggattggacgattccacccggcgtaagataaacaaccggaaacttctttggcacacgttgctaacaaaccaatcaacacaacagacaagtgttatgcaatcgcattacctccttcatactgatcccacaatcttcccagaaccatatacattcgaaccacaacggtagattgacgacccttcattaagggcaaactacttcggcaaactacttcttgggtttcggccggggtaccagagtgtgtctcggtatcaatcttgctaacgcagagttgtatctcgcagtcgcctatatctgtgcccgtttcgatatggagctatttgagactgaaagggagcgtgatgtggatgtggtcatggattctgttattagacaacctagtctggagagcaagtggatcagggtcaagatcacaagagatagactccaggatgagcaagcttagagggtgttagatcgtccaaggctttgacgatatcaacgacaccgacaatttcttggagagtacgagagtatccaaatcttaccaacatccaacatttgcgataacatcctactggtccataaattgggagttgtcccaatcgagcacggattgatatggtccccacatagcaggcgctttggaaaacgccacgggaaaaaaagagtaacattccacgggataatctccacagttcgtactccgcaggttaaggtcagccagcctcaatcaaaaccactaggcttaaattagcccgaggaaaggccaccagtctcgtttgattggttcgctcaatggggctatagataaatcccacggcccacggagtttacgactaagattttccggtacttcggtgctcctctctaaccgaggggggtccccgaacttggaataaataacctttggaattgtataacattagaagccttcggcccttaaatactattcggtcatactttacaaggatctagttcaaatcaacactttatttctcaataccttatgaaaattaagaactggttacaacaaccgtacaatgtctgccagtccaagtgaaaataggccaccagtcagagttgccaattgctctggttatcatggtatggggagcactgagattaaaccaacaggactaacgtacaaaggtgatcctgcatacgaaatgtatcggcaagcgactctaggagatgttgacttcatcacgggcgattacctggccggtaggttgcttggtataaaggaaagagataccaaggactaactaagctcagaggtcaacatggcaaataatgcccagtccttccaacgtggcgaacaccccggatatgagcagacagcctggcagggtatccagcagaccatcaatgtgattgccgaaaaaggcatcaaagtcgtactaaatggaggagctctcaaccccaaagggctagctttgaaagtacacgaattggttagtacaattcctcaactataccaatctatatactaaatcaatcgtccaaatagatccaccaaaaaggcctcgctttacgagtagcttacctatctggggacgacctctacaccaaattcggccctaacatgccgcaatccccagaacaactccaacacctcgacgccgaaaacagttccatcaaacctagccctctcacctatgcattcaccaacaccaccaagcctatccctatggtttcagcacacgcctacctcggtgcccggggaatcgtggacggcctccgtcgtggggcagatatcattatctgtggccgggttgcagacgccagtcctgttattgcggcggcgtggtactggcactcctggtcggagtcggactatgaccgtctggctgggtccctggtggcgggtcaccttattgagtgctcagcctatgttacgggcggtaacttctctgggtttgatcgacaccccattgatatgtttgttaagccgggcttccccattgcggagattgatgtcgatgggtcttgcgtcattgcgaagcatcctggaaccggtggtatcgttgacgttgatactgttcggtgtcaatttttatatgagcttcagggaaatatttacctgaatagtgatgttagtgctgtgttagatgatattgtggttgaacaagttggaaaggataggtaagtttccttcttttattcatcgttgtgttggtctgcttactggagtctagagttcgtgttcatggagtacgaggctatgcaccccctccaacaaccaagctggctgtgttttatcctggtggtttcgaggcccagcttttactgaatgctactggatatgggtctgataagaagtgggatctgatcgaaagacaactccgacatttcattccgaaggaatccatcgataagatcgagacacttgaattccaaaggtacctttctctcctctttcagcttgaaccagtgctgacagaatatctagaatcggtgttcctgccccggaccctcgttcacagcgacaaagcacgacatacctacggatctttattgctgcagtcgaggccgatgccgttctcgctgtcgcaagagcaatgcaagaaatttctctcaaacatttctcgggtgcggaccaatatctgttatagtaatatccatactccaagctgactgaccactcaggattccactcctctctcgacatgcgcacagcagtcccacgtccattcctagcctactatcccgctatagtcaaacaggatgatctcgacgaggagatccacttcatcgacggacccgattctatcatctcgttcccaacaggtcatcctccagcatacaaagctctgcagccacgcgtaagctacaaccacaccccatccagcgatgaagtcgccctcctccaatctccaactcggtctattcgattgggagacattgctcttgcccgatctggtgataaaggatctaatctcaactttgggatctttgtccctgacgctactcactggccttggttgcggtcttatatgagcgttgaaagattgcgagagatgctcgttgatgatgatgactgggatgagtccttcttagttgagagggtagaattcccgtacattcatgccgttcactttgtgatttatgggattcttggtcggggtgtaagcagctcgagtcgattagatgggtttggtaaggggtttgcggattatgtgcgggataaggttgtggatgtgccggcggagattttggattgagtctttattcatcttgtgggacatatcatgggtctatctattagtgagatgcggaaattttatcatgaagtctagaagacacatattggacatgcttatcatgcttggaccaatgaacaatgcgcacatcgcatgaaacatcaattgttgaagcatgcacgatcattcatgccactgccaggatagcgacagcccaaggatccatgcttattgaataatttccctgtccattgaagacacccgtagtggtggtctgaatttgcacgttgaagggcgtgttgccttggtacttagggccagcaagcatctcaagtttaccagtttgggttcctggtatactcacttggacattctgatgttcggggccatagtttgccagtttcaagtagtattgtgaacctgtcttcgaagccacccagtaaagaggtccaaatcctgttgatgagtggactggaagaatggtgtcacccttgttggatgcgaacatcttttgcacaaaatatgaaacagaaggagtgacagagtcgggagtcgaactgaaaccgtatagggtgggctataagtaaaaacagcgcggtcagctatgtttgcactgttcctttaacgtcttctgggtagatattcttaccgaccaagacacaaaatcaaagtgttgcatcaagggtgcataagccaccattttcacaatatcactgttgcgttcgattccgatcatgtacacagcctcactgcagctgccctgcatgtagggccagtatgttcctgtctcttttgtagtattgcgacatccaaactcaccaatcatcactgattgattccgaggctggttgtcaaactggtcgaacaatttcacaaagtcatctggtgctcggtaaagatgcagatcaatgatgacattttcgggaagcggagatggcaaacacgaatagtccccgttggaagcaacaaaagtgatgtgcgggtacttgtcgtggatggccttgtagatttgattgaaacgatccggataggtgtcacagccacgggtgaggtcatcttcgttaccaatttcaataaggtcaaccttccacggatctttccggccgttctgagctcgcagtttgccataatgtgtcgaggagtcaccaaacagatactccatctcgttcatgatgtcgtggacaaaaggctcgaggtccggcccggagagaatatctccataagacttgcctgaccacacagccaggagtggcgccatgttcatgtcttcacaccaccacaggtactcgtccaggccgagggcatctgtattggggtaaaaccagtcgctctctcttcctggacggtcgactacgggtccaatcgtggtgttccacttccagcgagaatcaacttccaggccttcgaggttgttcccgcctgggaaccggagaaacgccggattaacttcatccagaaacgatgcaaggttatgtcgcaacccattttctcttcctttgaaagtgggagggaagagttggattaagccaaagttcaacgagctaccggcaactttcgatccatcgaatgtcaaatgccactcattatccccttctggtgcgtaggtagtgttgaacctagttttgaattccgtaaatttcgaatgcgtactcttcacggtcaaattgtgatcggcatataccgagccattatgcgacccaacaagccgcaggttgatggttcccgagtatttgcccatcatccagaatgaacagttgtatgtggcacccgtaacctgaattccgttgtaaccagaattggcaaatccgacatagtctttcaccccatccggcacttcgaccttgagcgaagacgtaattgctttgctgacaggctttgatctatcctgggagattgtcacatctcccaccggagcgtaggcagttaaaccaagactagttccttgaaatccattgttctgcagcaattgcccgtggattccaccatcgccttgagatagttagtaatgctagtgagcagcaaattcgagttccataccagaatggtccatttcctaacaacatcacggatcagcaacacagtcattcgcgcatagagttagctcttttctcacctcgaacataaccccatatagaagtggactcgacttattcccaccgtcccttgcgactgccagtttgacaggagcagttgaactattccctttcgccaacgcaccggctaggcatgtagccatagcaacaaatgtcgcgagaccggcgcatgacacagatccagacttcatcacgagtcagagcctatagacaagtatatagcaaagagttgcagaggagtgaaaagtgccggcaagaatccaagctcgggaaggtcaagcttttcaagacgcactgcccctgctttgaagaaagtgccttgcactgctatgggtgtgattcgttcgttttggacctggcctgacagtattctccacagaagcatcatggaccctgagatggagcccgcatgcaaatcaaccggtcataaagcctgggatctaccgacatgtagggaaccacaacgagcatctttaaacatcccgttggatcatgctatttatttcttgcacaccccaatttggcagtcttcctacatcgtggcttatgtatctgtgtgcactgcgcagacaggtggagagcagtcatgacgtcggataactcccaaggtcggatcgggatgttagcctgagcaaggcatccgaattttgccttggcatttaggcgaataacaagtcttgatatttaccagaaaagatatttcgcttgcttttatcagctcacttctgataacaaacaaaaataatgatcaaagacgagactaagtctaagaaggcggtgtctgatctgccatctcacatgtctctatttccaaatcgggattagctttcttctttccctatctaagcttgcctcgatttcatcaatattcttctccgactctgaacctcagagtgaaagatgaagtacattgtggtatctggaggtgagtttaacagtgatctgccagaagtggctccgccgttagcctgcggagaaaagcggggcagactccatatctcacgtttagcctttcgaggtataacagacataatagactgacatctctaggcgtcatttctggggcagggaagggcatcgtcgcttcgagtgcaggtctgttgctccaaagcaaagggtttgtcgtcagcaccatcaagatagatccctatatcaacatcgattcggggactatgagcccactccagtgagttctgcagatctgagcagcttctgcggatccatttattgatttatctagccatggagagatctttgtgacagatgatgggggtgagataagtcttgacctcggcaacttcgagcgttacctttcaaccactctccagcatggtcataacatcacaactgggaagatctatctagatatcatatctagggagcgagctggcgattatttaggcaaaactgttcaggtggtgccccatgtcaccaacgccatccagaattgcatcgaacgggtagcgaagatacctgttgacgaatcccaagccgagcccgatgtgtgtatcattgagctaggtggtaccgtgggggatatcgagagttcgcccttcatctacgctcttgctcagcttcgaaagagggttggcaaagaaaacctcgttcaaattcacgtagcttacgtccctgtcgtgccgtaagctcttcttgtttcaggcgagggcatactgctggaatctaacgccaggctaggccgggagcttctggtgaacaaaagacgaagccgactcaaagatccatttccgacgttcggagcgctggattgagtccacttctagtatgctctacatccatgtgtatcacgcactctaagctaattgaaaaaaggttgcctgccgctgcgaggtgccactagatccaggtaccatccaaaaaatcgcgaatatgtgctcaatggaaccggaacaggttatttccgtacacgacgggccaactacatatcacctaccgctactcctcgagaagcagaatcttctcagcatcctctgtgagtatctccaacttccacttggtcagacacccacccagcgtatcgaacaaggcaggcgcacgtggagtgactgggttcaccttgttcaaagccaagatactatcaccgacacagtctcaatcgcccttgtcgggaaatacacctccaataaagatgcatacctcagtgtttccaagtcaatcgaacatgcagccatgtactgtcacaagaaagtcaagattgtatggattgactccgcgcatctcgagcaggagacctatcagaactctgcagtcaagtatcacaaagcctggcatgatctctgtagcgccaagggcattgttgtgcctggtggttttggtactcgcgctaccggcgggatgatcaaggcaatcacatgggcgcgggttaataaaaagcccttcctgggcgtatgcctcggcatgcaactcacagtggttgaatatgcccgtcatgtgatgggtatctcggacgctgggagccaagagctccacccagaatccaagaaccatgtgatcattcatatgcctgaacgcaatcaagagaatggccgtgacaccatgcgtctgggcaagcatccatgcatcttcaaggagggtactgagtggtcaaagctacgatcgttgtatggccccacgatttctcaaattgaggagcgtcaccggaaccagtacgaagtgaacccggaaattgttgaggaacttgagaaagccggtcttgctgttgttggcaaagatgctaccggcaagcgtatcgagattgttgagattcgcgatcatccctttttcgttggtgtacaattccaccctgaatacttgagccgtgtgttgcggccgagcaaggtgtttctcggcttcttcgctgcggcggctaagtgcttggagaaaatacctatggcattgcaacagggccggcgaagccttgcggaagaagatgaagaagcgatgggcaacttttgaagctcttagcgtcatctcattggttggtcttgttcttagcgccggcgttttaagttgcattgacaactaaggaatcggataatttcaattagaaatcaatactttcattgttttactttttcgacgaacatttataataggaattagaacctgcaaattcagatagtcgtgcagttccaatgttttttttcctgacaactacataaaagcttctcagtctataccacaacataatttcactcacatagaattgcaaagataaccaactttccgaacaaagcagcatgaattactgcagcaaagataaaacctctcaaagtaggaccacctgcagaaaatgaagtcgttatgaaagtcgcctacaccgccgttaactccgtggatggaaggcaagatcttgccaactttcaggcatttattctagggtgttgttagatgtattattctaaccagattttagctacaagtataaacatgcatatgaactctgtagtaaaggtggatagcactatgactgactttgtttgagctttacatgagaaaatagaagcaaattctactgagtagagcaatattattatgtgattgatgtatttgagaacttgagccgatctagaaggtgagcagttcttccatggccatgtcgtcaatttatttcatgcaagagaaagcccggaatgcaagttgagaaagccaagcgaggagaagggaaacaaacacaatcataaccagaatccgaagagggatggagatgcacgtggacagtgaagttcacgacaagactcaacaaggtagactaccaggttgacattgacaccgaggatgatgaataagaagaagaaagaagtgggtgtataatgcatatggtggataaggataatgtgtacagagaatgtagaagaaaggtccgagcctaggttttaggtcagatcaaaaccaagacagaacgaaagtcctgccctgaaaggctggaaagaaaaggctttgccaaattggaccaaagaaggtggtgaggccgggtaggagggagggaaggtgtcacatgttgtcggaggggctgcgttacaaggccaagacaatcggcttaattcgtcgcccgcttccagaacttccagccctctctcctctcctctactccgacgccaacaagacgctcaataccttcagggccctcggcattttcgaacttctgttgatcgatctcttcacctccctcttcgtccgatccattacgtaggacggccgggtagagaacaccgacaccgtcaccgccgagggtaacctcatacgtagtgaaaccctcctcctcaaacctccgttcgagatcctgcttgacttcggccttcgcgttgggccggaggagggtaatggcacatccgccaccgcctgcaccggtcagctttgtccagccaatgtcggcgtaatcgacaagttcacgaatacgttcgaggcgggggtgggagacgcccagggagacaaggaagccgtggtttatacggatcagggttccgaaatgggcgagggtggcctcggagatgccctcgaagctagggtcctcaatcaaacgttgtgcagagctcgtcacttgatcgatgccgttaagtattgactccgtcacgatggagtgagcgtctcttagagctccgactttgtcgacttctgtctttgtggaacgcgcttgttgggtgtcgacaagtaggagagggagttcggggaaagtaggtagcgagacgactgttggaggtttcgtgtaatcatcgcgtcggaaaatcacagccttgccgcctgcggccactgtgttatctaccccactgggattgccatggatgcagagctcgccgacgaatgcccagcggttgatacgttcgatctgtgtctctgcctcctccggtggctggtctgggtggggcccggcgagggtacggatttgaagaagcagcgcagaactgagacagacgcagacactggcactgctgcctaggccggctccggtagggatggtggatcgaagagtgtagatggcgcctgggctttgcggggagcctaaggagaggaagagatagaggaacgaggacgcggagcggatgtgaatattgcgctgctcctctgggaggcctttagagacgccctggaggtgtggttcgattgcctcgacgagttctgggtcgagttcagtgacaaggctgtagtaaaacttctttttggacggctcgtggaacttgtcccaaggtagggtgtcaatatcccaagtgtgactaagacccaagtcccggaagttcagggttatcgtgcgctgcgatttggaaagggtagtgacaagaaggtaggagcgaagagagatggctgcggccatggcagccttgccgtggaccacagcgtgctcgccaaagacgataaccttgcccggcgcggacaccatgaaggtaggtgccatgggcgaagaggccttgcgagtcattatcgggcggtttcgttccccagtagcggttgcttcgtgtgtttctgaggcggaggagacggaggcgctgtcggagctatcgtcccggacacagtttccgttcatacccaaggggatgactttaaccgtgctttcgggatggaaatcgactgtacgacgtgaaacgggaattgtggcccccataccgttcaatgggcgagtggcattctcagtcatgacagtggaattcgaggggcgagaaaggggaagtgattaggaattaaaaggatagaaatagaagacaagtcaacataagcaaaagaagaatgagggggggagtagaagaatagcctaagttagagatagcccgagttatctggagtaagcaaatggagtccaaagttgggggagaagtgattgaagctactgggtataccagggaacgagagagaaacggtccaatcacagccacaacaataccaattggtcatattagacctagttaggctgactagttagctagttagttagctgttggcctatttcgtacttcgtttcccgtctcgattactcgttatgtcccttcgtcttggacaattctgcctttgcatatccaagtgcagagatttttgtggcgtgcagtagcgccgggatcgtctctatgccttaatacatacttccaatctaagaaaatctaatgtgctatgtacaatgctgtattcatcacaaattcatcgtcacggtcatactgttactatgcaccagtaaacaagggggcaggccggtccacagaacatccaggtcactcaaataagatgcactgtcctcggcactaagcgaagtcccctccacgggagacggcagagtcgtgaaaataacggcggtatcaccactctgctggaccatcaactcgttcagaatcaaatgctgtgctcgactcgggaggtcattgaaagacaatggaaccgacgctacaccagggtatcctgttgcatgtgtatgtgaattgctgggggcaccgggggagggagaagacacgggagatgggcgatgggagtagatagagtctagcttgtttgcagatcgtggaggtgagctttgcgccgcgaacatgatagacggtccattgccgtcttcggcttcggtgttcactttggcttcagggataggtgaggagctgaaccgatttctggaggcagaacggctgatggggggccgaggacccggggtattgcttttcggggagccatcgtcgccagtctcaattatagatgggattatctggttggatggcgttgcctctgcttgagggctcgcactcactggtgtgctcggggagtctgcgctagggctgcaatcatcggtcttggaccgaccaaggagtcttgaagggccgggaacaggtacatcctcatttcgagccctggctatgtcctctccgccgtcttctggctcgctgacatacgcttccagatcgctgtcgtcgctctcactcgggctatcggagctgtcgtagtcgacgaacgcatccagcaagcgatgcgtttgcatgccaaggttcactccgcctagagcccggaagctggagacagatcgtctgcgacgagtggactgaatcagtttcctcaagccagtcacccgatgatacaaaggtttggctccactgtcttggctcgatgatccttgccaggtatatgacttatcaagatggaaactgtcgctggttctatccgaatcctgcgggtcctgatccagcgcacgagctcgtaagaccctttgccaccagtcctccccctgtagagcagaattaaccctctcttgggcatcagctgtaaccgaagtgccattcacgatggtttgataagcctggagatcaccgcaggcaagccagaagaccaagacttcggcttcaatgcgtaatttctcaaggagggcctcaactcgcgctctttcatcttccaaatcggtctcgtactcgacgaacaccgcaactcggattttgtatgtcttcttccacgagggaacagtgttgagaatacaacccagttgaaggatcaaagtgtatgtgtcaaaattagtggtcagcacattttgcttgctttcactatcagccccaagctcggcggacatttggatcggccacaaatcaatatacttcttagtgtgacgaccgcgggggtccggtagctccagatcttcgaatcccttagctacggcaacattgatccgaagcttgaataagagatcttcgaggatcgtgacataacactgcccactcatgggcgggtttgccgccccagactcgctgggctcctcggttcgcgtgctcgagtggagcgaatggcgtctaacccttgaatctctacgaccactggtataggtttcaacaagcgactggtccgatcggaattggtcaatcacaacgatgttgggcctcatgccgcccagtccggaattcaaaacaatatttcgcataccccattccgcagccggggaaatggcaatgttgacgaaggctttgatcttggaatgctcgacgaattttgtccatgctgtctgttggcgacgtgcttcggggacagctgctgaaaagtcatcggtcacaagaacatgggccagcacaaacaaagatcctttcttcaacgagttgcagaaggagaccattttgtattgtctgtcgaggtcgctgacaaagagcaggatctgaggacgccagaacttgacgtgctcctgacgcaggcgaagcaggtattttcgcacttgatgatagatcaaactttgactgacatcgccccaaggcttgggtggcgagctataatggatcagcaagaagagaatcaccaggatgcctacacatcctgtagcgtagacaccgtccacaaaaaacatgctgatcccactgacgagcgttccagccgctgcagtctgccagttgaagtagtggaacgacggacgaaagttgggtgcagagccaattttcaagaggaaacacgcgaggttcgtcacaaggaaagtcatcaagtaggtcatggtaacaaaagacgcgatgcgattgatgtcgaagagcattgtgatctgagcgaacacaaaggtcacaatgatggcatatacgggatcgtcggttttatgtgtgccttgggcaaatatccctataccaggcaagaggctatctcgcgcaatagcttgaagaagtttagctgatccaatcacgcccatcagggcagaaaagaaactagttgcgaattcaccgagaagaatcacactatcagaggcattcacctacactcaattagagcgtgcttgtagttattctctcaaaaaagaaggacttacgatttgtataacattcacgttattataaaaagactcccgggtcaccgaggccgccatcgcaaggatgacaagcccatatgcgacaaaagtcaaagctaacccagagagcgtacccttaggaatagccttgctcgggttcttcaaatcaccagacatacttgcacctctgatggccaattagtgaaatggggctgaaagtctgctgtcgccaacttacgcaaaaatacctcctgttgcaggaaatagaatgccaaaaaggtcttggaagttctctcgtccttttatttggcttcccgcggctcccttggttagatggggtttgagattccccatcagagttttcaaacgaattcccgtgaattccacgccctgacgggggactgggaaaggcttcatgaaaactgctgagagcggtatgctgaaagttgccacgagtagtatgaccaaaagcccgttgcttgccctcgcaaatatagaacttcctgccaagcaaaccccggtgcaaaataccaatataatagttccccataggtactgccaccaaaagccttcctccaggaagttggcccagtccccagactgcgccccaaagttctgggtaaaacagtccactaaaccaacggcattcatgccggtattgaacacatagccaagatagaatacaatgccaatagagccaccaaattcggggcccagagatctagaaataaggtagtaggcaccaccgcctcggaccgttccgtttgttgcaattgcggatagagacatcgttgtcacaaggttgattgtgtatgatataagtagcagcccttcgatgtatcagccgtggggtcctgactttgcgagaacctatgctcacctaatatgcccaagacaccagcttgtcccaggatgaatccgaaccgaaggaacataagaatgctcaggacattcaatgtcgtgggaacaaagacgccagagaaagtaccaagcttcttcggctcatccatcgatcgggatcgatgtccactcttgtccttcttatcggcgcgggcgtcacgaagggaatccgcagacaggtacacattttgtgaagtgttctcttcaccagtctcctgctcttgatcgccatcccctcggttatgccaccaccgagaaattttctggaagtaattcatgggtgaggaatggcgtcggccctcaattggttctgccgaattcacgggctcatacgggcgggcccatggagtcggtgaccagggtagcagtcgagtacgttcgtcggagttagcatggtccgagtcccccgggtcaagacgtgagacatcctcttgagcagttcgagtcgcgaaagttgggcgtcgacgggacaaggagtcggaggattctaaggctcgtttcgccatctcagttgcaaaatttatggtatgagcatgaggacataaacaacaaaataatctagataacagaagccaatagtcccagcaagactattgagtccgcagagacggcgctaatattaaatgaacgagaaggaaaaacaagcggtatcaatagatgacgttgataggtgcaaacagtttccagtttgcatcccgtcaaccgcacttaggagctgatcggccacggactgcttggcgctatttttgtgtctcaaatcctcctcagttacatcctagccttttcactcgaattcttctccgaggagctgactgcactattgctttaagcttccggccttcttttcatgcgcatttcccaggcctaaacaaggcatcctgctaggagctaacttgaccctgaggccaccttcaaaatggcggataatggcgagggtccatccctaaatccagctcgatctgtgccgatagcctcgtcctccgcgcgctcgaggtcccccgcacctgagttcggtagcagacaggcttccatggcacgcctcgcatccccagtgccctctccttcattaggaacgtccttgtcatcacgacagggtattccggccagccgacctgttacaaacaccaccaccgagcaggagttttccagatcgattgccaatccatcctcgatccccggtcctggacattctatccttgcatcccaactccaagaaagcctcggtcgttcgccgccgagatttggaactccgtcacgacacaacggatcccctgcggtgcattcgacgttagataaccgaccgttggcctctcagtatggctctttcgatactaaaaacggagtcgactcgtcgagcatagccccggtagaagaccctgaagttatcaagcggcatctggtcacggaacacacagataatcagtcggaaattgcgaccagccttggtggcgaagatactttctcgagtctgcagcttcaaggtggtgatattacacgacaagtttaccgttgggcggaggatgccgaagctgaagccgcagggcgattcttgcgcagcaagagtttcagcgtcagtcgaccaaggccggagacggatacggaagacattgacacaattcgggtaccaggagggtttcgcagggattacctacgaagagcagctggaagtccacaccgcggagatgcccacgggtcaaacgtagggccgccccatggacacggcgcacctcaactgccgactaccagcttcttggagttcttgactctctatggacactttgccggagaagaattggaggaagatgatgaggtactagggccggatgagtacttttcgtctgatgcctgggacgagccagatgatggcagagagtctggagaagacgcagcgctgttgccgcctgaaacaccgggtcggaagaagagaaagcacaagcaacgctcaccggtagggacaactaccacaacaggtgcagtactcttgctgctcaaatcctttgtaggtactggtattttgttcctacctcgagccttcctgaatggtggtatgctctttagtagcatggtgcttctgggagtctcgattctcagctattatgctttcattcttttggtcaatactcgcacgaagatcgaagggtccttcggtgacatcggtggcattctatacggcaagcacatgcgacgcatcattctcggatcaattgtcctgagtcaattaggctttgtggcagcgtacattgtcttcgtctcgcaaaatttgcaggcattcgtgctagctgtgagcaggtgcgcaacgttcattgacatcaagtacatggttttgttgcagctggtcatcttcctgcccctgtctttgattcgggacatcagcaaacttgggtttaccgccctgattgctgatgtcttcattcttttgggtctcctatatatctactactacgatatcagcactctggttgaccagggcggcatctcagatatcgtttccttcaatccaacaacctggtccatgttcatcggtaccgccatcttcacctacgaaggtatcggtctcatcattccgattcaagaatcaatgaagcagccaaacaggttccctggtgtcctggccggcgtcatggttctcattacctttatcttcctctctgccggtgccctgagctacgcggcgtatggatcggcaacgaaaaccgtcatccttcttaacctcccccaggatgacaaatttgtcaacgtggtccagttcctctattcacttgccatcctgctgagcactccgttgcagctcttccctgctatccgcattatggagaacgagcttttcacccgcagtggcaagtacaacccatatatcaagtggaagaagaacggcttccgtttcttcctggttatggtctgtgcccttatcgcctggtgtggtgcgaatgatctagacaagttcgtttcgctagtcggaagctttgcttgtgttccattgatctacgtatacccggtatgtcttatcatgtgtcctcctaatcaccacagaactgtatgactgactcagtatatcactgtagcccctcctgcacctacgcgcttgtgctgcctccaagcgccaggcggttgccgacgtaactcttgctgtcttcggcgccatatgctgcgtctatacgacgtacctgaccctcatgagctggatgggccctgacgtccctcaaagcccgggatactgtgactctctttgaaaaaaaaatctacattctatatcatgtagagcgtggcgagacaggttttgttgcattcctttgttctgtctcaaccctagactggcatgtctatcattgggttctcatatgttccttcaacgcatggacggaggtcatactagggacattattcacagtctcggtcaaactgtgagtatagtgggcgcattggtgtcagactaccctttctgtatacatactttcttggttttggatactatttactctaccatatttgtggagcttcctttagaagttcatctgaccgggaataaatcaaggataggacccagcctatcaccgaatcccgaagttgtcacggagttcatcctaaaaggaatatgattcgagcgcaacaatatagagcctatgtacagtgattgtcagcaaaccggaactagattgcagccagcgtcgatatctaagcgtctcccttaaaaccgcaggtcttcctctatatttctcctcttttattattggccggggctcatctggtctcatgacataaacccgcaggccatattggtaagaaggtgcaattctgcgaacgagacagatgctatagccccaatacaaactgaaaggaagcaagcacaaccaattccttctcggagacgattcttaagcaccagcctcggcagctgcgctgcccttagcagcctgctcggcgagctgcttttcccggcctccaaacctacaaagtaggaccaggttagtaatcacgattatagatgcttgtggacgatgacaaaagccaaacaaggtgttgggggatgaagcgtacttccagtagttcagataacggactgcctgagtaccctgggcagcgaagttggttacatggcatgcgaagaggaggtagttcttgggggtaacagcgagggagtagcgcatgaaggtggcagcgtagacgacgagggcaccggtcatggggccggagatgctgtgaagatagagctatcagtacaggttctctgagactcaacagccaaggatgagatggaagatgaaaggcgaagctcccattattcatcggataaaaacgtacatctcagcgtccttctgtgtgtccatcacggcggcaatggggataccgaagttggagacagggccccagaagtctagagagcatcataggttgtcagtaatttgtgcaattcatttacacttcatttctttagaaaattgcaagctcgaaggccgaaagcgtgtttctcccatcctcaacgtcgctttcagtgctcagtcggcgttggccgacctcgggacggcaatcgcgccgagagaaactggggtcaataatacgtacgggttgagcagacatagtccagcaccgagttagagcggatcttcgcgttaattgccttgatagcagccgccattgtgaaattgctgagagttatcacacaggattagattcggagaaggaaacgtcggtatctagaggatggggaagccgactcaccggctgtcggtgtcggcgatgtcacgtgcaatacattacattatcatctttgttgaaactgatgtattaatatataaactttgattgaattttagtggttatgtataatatggtagaatatggtagtccgaagctcaatttaagacaagtatcagagatatatatcggattgacctccacttcgaccatccaaaatctatttccatgttacgatctaaccaaatcatagagaggaaaacgacaactagttactgttagatataaaacgccaggctgtcacataggcctacatggccactagagtgcaaggaaggcccggtacgaagtatgttgggtagtttagatagcatatgatatagaagacacagcataatcgagagaggaagtggagatgaagaattgggatattaaacggttgaattgaagaggctcgtttaaaaagctagcacattttttttgacttaatgcgtaattcaagaggattttggtcttttttgtcccgttcctcgacacgacctccatccatgcgccgcaacgcctaacccagtagaactcagggtgatctagcctgtccgcgtatcgttatctctcgctggaggtgttgacaatggctattattctgcgccgagccgcccttgtttctttcggggtgaaatcagatcgtcgataatttgaagcatagaatactgcttcgtacatatttccaattacctgccaccgaatccaggaggggggtatccgcgtccctgaccgggaggctggaagccaggaggaggttggaaaccgggagctatgaaaatggaatatcagtatgggagacgggatgggacagttatctctgcgcaaacttacggggaccaccctgaggagcaaatccaggaggaggcgcgaaaccagctaggaagaaaccagtcagtttgagtctcagtcaacctaggaaaatgggagtatttacgaggtccaccgggggggcctccacgtccagcgaatccgggaggaggggcaccagggaaaccgccagggggaaatccaaagccacctgggggtgggggtccaccaatgccggctgcagggcctccgagtccgataggaaggccgcggccagcgggcttgctgataccagggcccgcggcaagagtggcagctgcgccgggtccggcggtgccaagtcgggcagaggggtcggcaggcggaggaccttcaacagagcaagagacgacttgagtaccgcgcacgatagttaggccgaggcttcgcttctcttccgcttcgaccagcggggcgtttgtgggaccggcagtgggcttagatttccgcttgatgcgacggaattcttctgtgtcggcaagaacaaggttcatgtgctagataacggaaagatcagctgggcgcctcggtttccaaagcgaagagaaataccttatcaaaggcaagcatggaaccagtcatttgacgtccatcgttcaatgttacgcgcatccggtagttaatctggaggagttagatacttcaatcgagtactgaaattgatttggaccagactgacaaggttttgctaaatgagagaagttagcgacagccattgaccaaacgggtttcgggggtgcaaatgggaatgagaaactcaccatcttgtgggaagccatgttggctatagagcgcgcacggatgcgacttaggagactgagtaatagagatcagtagaaagagaaagtttttctactgcggcggatgaagcaaaagtgcgagatcctcccaaggatgcgaagctcaagcttgtcaggtgctgccagttcttgatactggattacctaaaatatgagtcagcccaggttcgcaattttaatgcctcaggcagaatgcgggtcagaaatattaatgactaagcgcttaaattagactcattacctaagcagcaatcagggcttccaaatcacgtgtgggaacccacagtccacactttctctttttccgcgatcacttttgtctcctcagtcgacaaccacttcacgcccaaccgccgtcatggtacgttcagctccttgcaatccaaaccaagcattcccaatagaatgtattgttttatgtcattccatttgatatgggctgcaacctggacattttcgtcttgcgcgcacccaatcttcaattccctgaaatatctattctttgactagatacaccatccacaagttgagactaacatgatgcagtccgcccaagttgctaaggccgagaacccctgccgatcccttcgcttgtcgaagttggtcctgaacatctccgtcggagagtccggtgatagactcactcgtgccgccaaggttctcgagcagctgtccggtcagacccccgtctacagcaaggcccgttacaccgtccgtaccttcggtatccgccgtaacgaaaagatctccgtccacgtcaccatccgcggcgccaaggctgaggagatcctcgagcgtggcctcaaggtcaaggagtacgagctccgcaagcgcaacttctctgagaccggtaactttggattcggtatcagcgagcacatcgatctcggtatcaagtacgatcccggcattggtatctacggcatggacttcttcgtctgcatgtgagtttcttactgatcaccggatttggaggcaatttatctcggatattaacaaataattccagggaccgccccggtgcccgtgttgccaagcgccgtcgctgccagtccaagatcggtgtcaaccaccgcatcaccacctccgagaccatgaagtggtacaagaccaagtacgatggaattatccgttaagtctcaaaatcagagataatggctgggtagggcctgtgaagtacgaggtactcgacaagaaccaaaaaattatcccgagtactcgaggaaacaaaatttgtggacgggcaccccactgccagtcggcgggcccctttgatctctgcatccaacaatggtcttgattttgtactccggcaaccaggataggcgtgggagagacatgaattgattattacctttttactgctgcttttcccttttcacaatgaggcttcacgagaggtgatgttttccgcataaccattgttgaattggatggcggacgctgggtttcgacctagtgtctagccaagactcgcttgagaatgcctcataggcttcgtcaaagagtcggtctcttttccagcgagaattttctcgtggtggattgagtaccttgttctggcctatcttgtctgtccttatcctatcctcgtaggtgcaatttgcctggcatagaagtaaatcaaccagtcgtagcttgtagattgacaatatggtcctccgatctgtcgggaatgccgacataggactgtccacgcttatacaatcatactttgtggccgcttcgacaacagccttttctacagggtggtctggcctatcctcgaccataaattgggccataatggcgcgaactggccatctcgccatatattttgttatgtgtatcaaccgaacctgctaatttctacaacctaggcaattaacatgtcccgctggtcgatccccgcgtcttttaagtccggtccacgtacgacttgccgagtagctcgtctcttcaatgtacatcagtcaattatgaggcttttatagaaatacaagaagccactagaatttatcttttgtatggatgcccatgtacaaacattgagtaaagcccgtatatcgtgaccataatgttgaatgttaggaatatatcttgattctaagagtttagtaactagttacctagccagtcaattatttatttgtttggaagaaaaccttttgattactatcctagggttgaaaattgccactactcttattttaaacatcgattatctgtaaataaacagtctggagcatatacaatcaaggaccatgtatggtatgctagctttatttcctctccaagtaacactgtgtggttgaggtataagtacaaaatgtacattctagtttacgtgtttcacgttggaccatgcgaagagccaggtatagtgtcatttcattctctcttattgttcttttgttgtccttgacgtaaatgataatgtaaagtatccagggaagatatagaatatagtaggtgtaagcctatatattgcacttcccagcatggcgaaaggaccagaaatcaccaccactaagactgaatttacaattttttatccaccatctcaatattctcgctactcaactcatgtttatcttcacctgcttccagatccatggttttggcatcggcagcctcatcaactccagccacaacactttcgaaccggcgaccacgtttctcaggaccaatagcagtagtgatcatgataccgagagcaatgatggcagttgccactgccatcacaggcccataggcctcaacacgatggcctgttgtactagtaataaaggtagactcggagactgcgtttataatctgcgaagatggcgaggaaatcatatttccaatctggtatgtcagacccgtgaacgaagagcggaacgctgggggagatagttcggctagatgaacgggaatgacgccccatgctccctgaatgaagaattgcatgaagaatcctgtcacactcagagacctctcgccttctgggaggatccatgccgggatgaggactccagatgccaaggcggcgacgatgattgctcggcgacgaccaaagaactgggataggtagccgatgatggttccgcccacacaggctcctgtcttcatcagaatagaagcccgtgaggcgccttcgttatcaagctcctttgcagtgagcatgaatgtggtgtacgaatcttgggatgtgtgggaatagaaattgaactaacgcgggacaaattagacaaatgctgataggagccggaatagcggttatgacatacccaggtcatgagaatgacacagtagatgcacatgcgccactccttgcccaacatgcttactgtttcacgccaaaactcgcctgcattcattgttcgcttgccggatttcctggcttcgatgaaggactgcgactcggggaagcagatgcgaatgaggccaattgcaattgagataccggctgcacaggaatgattgttagtgacaggtaaacagtattcgatggaatagtagactgacctgcaatccagaatacggtcttccaagtatctgttccaccgccaacaccaaggttggcacatgctgcaaatacatatcctagtgaatacccttgttgaaggattccagacataagacctcttgcgttgacactggttcacaagatgatcagcaaaagtcactcagccctggatgataatactcacgggcaatgttccaaagccatcgaaatagcatttccgtaaacgccacccatgaaaagaccaaagagacttcgcacagccaagaactgctggaaggtcttactataaatggtggcgatttgcaagattcccagaataatcatattgagcaccatgggccatttacgaccatatttgtcacctgccagtccaaagaatgcagctcctatacttcgcagcagcagagtcagagtaatggcagtcgtaatatctgttttggacttgtcgtagtatttcgccagctttactgtctggatggagagggcatggaagtcaaatgcatcagcagtccaggcagcgagtcccaccagaaagaacacccagtctcgagccgaaagctgcgccatcagactgaaggggttcttgataggctctggggattgccattctgcgtatgactctccgtgttcgttggtcacctcgacacgttgcttccagatgaagagatctccgatggactgacgtgctgtggcgagcataccatcaggaatggggtctgccctttcattggaagatgccattatggcgatctatcaagagaaggagacgagaaaaaaagaacgaaaggtcagaagacagaagaagcaggcaagtcaagctgaccaatagaaaaaccagatcactttgaacaaagcggactgactagaaaatttggtagtagactttgtgggattcttctggaaaatctgtggcatatccctttcaatttatatgtcggcgctcgccattttataggtacacaccgcgttgtcccccgcatctccatcccgcatttcccccgtgtcggaaaataacaaatgccgctgcaccccaggatgcccgagtttcggactgataaaatgccactccgctggtgagccaagcggatgccaagggcttggaagcaccgtgcctccaatgccaggacaggacatgagcaacagaccgcaccacacactttacggctggcttggcgtggagatgaacttgaccagaggtcgttccggacttggctctgcccacatagacaagcaccagtaagccgcgtggcgctgtgcgcgtggtcattgatcggttacgccgagaaccttgagtgaaaaatgggccgataggaattccagtgcctccggtttggtctttaatgtcagtttacggcgaagggcatcggaatatagcttccttcggggctctagtgggctctagtgggctattagcagtcggttatattgtcttggtctggggaagtgtgttgggggcccactaaagctggtgtaatagttagctcacttcatatgtagtttttttcatcttcaaaaatcagaacaaataaatctgtaacgcatactgaacgtacagattgaggaaggactaaagggacataagcgctgctcacacgtgataacttccgaagaatcgaggcgcaatggtaatactggttagatggcaggatccgctagagtggaactagttagttaaatgggccaatcaatccctaatcctgaatctcctgagttcgaaagtcttggctttagccgcgagaggctacaacttgctgagcttggtcaagggtaaaatgggctggacatgcacatcccttgcgttcagggtccatggtttaagggccagcttatattttcatgtaggcgtccacagcttgcatttggagaaattgggtctccttagaattagtgatatatgttcagagggtacggagtactatttgacttgaaaactcagagaacgtggccaggcgggtgagtggtaagaggctagagccacctacgtgttggtaaacattgtgaaggcggtcagttatacctctaacataggtagagatatgaacttgagctgacagcatacactctcaggttaatttgacaaacgagatatcaatgagtttgctacctaactttcactttgctctctctttctttttctttcctacctacaaacactgcatctgaaagagacgatccagtaagcccccgtgtcacgtgatcatccataagcgacacctcagcaacgacggcagcggcctcctgaggtcacttccgcatctaccagatctctacccccctcctcctctcttcatacatcttcttcttcttttcctatttcgtgctcccgacaatcgcatttcatcaccctttttcatcatacttcaattcttttgcctttgcgtggcgtttcattcagcggactaggtcgtactgcggcctacgtaaatatggcacctctccctatcaagttcacagagctggtcaatgtacgtgcctacccctcatctctatcctataactattgaagctttgaagctgacctgcgcctgaattgtacagttgacctctgtcggcattgcggtatgtacaaccaaccatgatcttcgtcgagctttgagacggatgcaccggccgcgcatcgcaatattcctggatatgttaggattgctactaactgttatgcttacagccggcatcaattggcttcacttcatgtgtaagttgtctaatgtcaccttgcgactgaccctcaaaacatggatgacaaggcccggctaacttgacattctttcgctttagacactagaatctgatcactacgtctgtgttcgccaaaagctagacgatgatgccaaaccagaggtcatcattatcgacctcaagaacaacaatgaagttctacgacgcccgatcaacgccgacagtgcgatcatgcattggagcaagaacatcattgccttgaaggctcagggccgtaccattcagatcttcgaccttggcgcgcggcaaaagctaaagtcagcgaatatgaatgaagatattgtctactggaagtggttcagcgaaagatccctcggtttggtcaccgactcagcagtttatcactgggatgtctacgatgccacacagcagaaccctgtcaaggtgttcgaccggcttccaaatcttgcggtatgtgatttgccacgtggatacaacaatggaagcccggtatgctaacttgcgtctactctttagggatgccaaattatcaactaccgcgtcaatgccgaggagaagtggatggtcgtggtcggtattagccagcagcagggccgggtcgtcggatcgatgcagctttactcaaaggagcgcggaatctctcagtttatcgaaggtcacgccgcctctttcgctagcattaccgtcgagggctcccccctacctcacagcctcttcactttcgccgttcgtacccaaacgggtgccaagctgcaaatcgccgaaattgaccaccaagaacccaaccctcgcttccagaagaaggccgtcgaggtgtacttcccgcaagaggcggtcaatgatttccccgtcgcaatgcaggtgtctagcaagtacgatgtggtctacctcgttacgaaatatggcttcatccacctttacgatctcgagactggtacttgtatcttcatgaaccgcatctccagtgaaacgatcttcaccacgactccggattccgagggagccggtctggttggtgtgaatcgcaagggccaagtcctggccgtcagcgtcgacgaaacgaatatcatccagtacctcatggagaaccccgccatgtccggtctcgctatcaaacttgcctcgaaggctggccttccaggtgcagatcacctgtaccagcagcaatttgactctctcatggcctcgcaggattacgccgcagccgccaagattgctgccaactctccccggggtttcctccgcactctggaaacaatcaaccgtttcaagagcgctcctcaaaccggtcagatgtcggtgatcttgcagtactttggtatgctgctagacaagggttcgcttaacaagtacgaaagtgttgagcttgtccgacccgtcttgcagcagaaccgtaagcacctgcttgagaaatggatgcaggagaagaagctggagagctcagaggagctcggtgacattattcggccatacgacatgtctcttgctctgactgtttatctcgaagctaatgttcctaacaaggttgttgctggattcgcggagactggtcagttcgacaagattcttgcatactccaagcaagttggataccagccagactacacccagctgcttcagcacattgttcgtgtaaaccccgagaagggcgccgagtttgctactcaactcgccaatgaagaaaacggtgcattggtggaccttgaccgcgttgtcgacgtgttcctgtcacagaacatgatccagcaggccacctcgttcctcctggacgctcttaaggacaacaagcctgagcatggccacctgcagactcgtcttctggagatgaacctcgtcaacgccccccaggtcgcagacgccatcctcgggaacgagattttcacacacttcgaccgtccgcgtatcgcccagctttgtgagaatgccggtctcatccagcgtgctttggagaactcggatgatccagctgtcatcaagcgcaacattgttcgcaccgacaagctgagccccgagtggctaatgagctacttcggtcgtttgtctgtggagcagactctcgactgcatggacaccatgctggaatcgaacattcgccagaacctgcagtctgtggttcagattgcgaccaagttctccgatcttctcggttctaaccgtctgatcgatcttttcgagaaataccgcactgccgagggtctttactactacttaggaagcattgtcaacctcagcgaggaccctgaagtgcacttcaagtacatcgaggctgccaccgccatgaaccaggtcactgaggttgagcgtatttgccgtgagagtaactactacaaccccgagaaggtgaagaacttcctaaaggaagcccgcctgacagagcagctccccctgatcatcgtttgtgatcgtttcaactttattcacgatctggtcctgtacctctaccagaatcaacagttcaagtcgatcgaggtctatgtccagcgcgtcaaccctggtcgcgcccctgctgttgttggtggcttgctcgacgttgactgtgaggagagcatcatcaagaatctgctttcgactgttgacccagccgttatccctatcgatgaactcgttactgaggtcgagagccgaaaccgcctcaagttgctcctgcctttcctcgaggccactctggccactggaaaccagcagcaagctgtctacaacactctcgcgaagatctacattgacagcaataacgacccagagaagttcctcaaggagaacgaccagtacgacactctcattgtcggaaagtactgcgagaaacgtgatcccaacttggcgtacattgcctacagcaagggccagaacgacctggagctcattagcatcaccaatgagaactccatgttccgtgcccaagctcgttacctcgttgagcgtgccgatcctgagatctgggcctttgtcctcagcgagaacaatgaaggccggcgttctcttgtagaccaggtcatcgccaccgcggtccccgagtctaccgaacccgagaaggtatctgtcgccgtcaagtcgttccttgatgcggacctgcctggcgagctgattgagctgctagaaaagatcattctggagccctctcctttcagtgataacaccagcttgcagaacctcttgatgttgactgctgccaaggctgacaagggtcgtctgatggactacattcacaagctcaacgagttctccgccgatgagattgctgagatgtgtaccagcgttggtctgtacgaggaagcctttgaaatctacaagaaggtcaataactacctggccgccgtcaacgtgcttgtggagaacattgtcagcatcgaccgagctcaagagttcgctgagcgtgtcgagctgtccgacgtttggagcaaggttgccaaggctcaacttgatggtcttcgtgtgactgactcaattgagtcctacatccgtgccgaggacccgtctaattaccacgaggtgattgagattgcaacccatgcaggcaaggacgaggatctcgtcaagttccttcgcatggcgcgcaagaccctgcgtgaaccggctattgatactgctcttgctttctgctttgcccgtttggaccagcttgctgagctcgaggacttccttcgcactaccaatgtagcggatattgaagcctccggtgacaaggcttatgctgaaggcttccaccatgctgctaagattttcttcaccaacatctctaactgggctaagttggcgactaccttggttcacctggaggactatcaagctgcagtggagtgtgcccgcaaggccaacagcgtcaaggtctggaagcaggtcaacgaggcctgtgtcgagaagaaggaattccgtcttgcccagatttgcggtctcaacctgattgttcacgccgaagagctgcagagccttgttcgccagtacgaacgcaatggatacttcgacgaactgatcgctgtcttggaggcaggtcttggtctcgagcgggcccacatgggtatgttcaccgagcttggcattgctttgtccaagtaccacccagaccgtgtcatggagcacctgaagctcttctggtctcgcatcaacatccccaagatgatccgggcctccgaggaagccaatctctggccggagctggtgttcttgtattgtcactacgatgagtgggacaacgccgctctcgccatgatggagcgtgcagccgatgcctgggaacaccactcgttcaaggacattgttgtcaaggttgccaacctggagatctactaccgcgcgctgaacttctaccttcaggagcagccccttctgctcactgacttgcttcaggttctgaccgctcgtatcgacgttaaccgtgttgttcgtatcttccagagctctgacaatattcctctgatcaagcctttcctgctcaatgttcagtcccagaacaagcgggctgtcaacgacgccattaacgagcttctaattgaagaggaggaccacaagctgctcaaggactctgttgaccagaatgacaactttgatgctgtggctctcgcccagcgcctggagaagcatgacctcattttcttccgccagattgcggccaacatttaccgcaacaacaagcgctgggagaagtcgatcgcgctctccaagcaggacaagctctacaaagatgctattgagaccgccgctatctctgctaaggccgatgttgtagaggatcttctccgctacgtaagtttgctatgtctgtcattgctcgagactttactaattttaactagttcgtcgatattgggagccgcgaatgctacgttggcatgctttatgcctgctacgacctcatccgccccgatgtcatcatggagatctcatggcgcaagggtcttcatgacttcacaatgcccttcatgatcaacttcctctgcgaacagacccgatcgatcgagatgctcaagaaggacaacgaggagcgcaagaaccgggagaagacaactcgaacagaggaggacaacactcccatcttgcagggctcgcggctcatgctgacacagggccctcaatcaaacggcgccggtctcacaccccaggcaactgggtatcgtggattctagaaccgtgcaccgtttttgcttttgattctccgtttctcttgcatttgtaacatacagcggatgtgatgctttgaggttgcaaaaggaacgatttcatatgggggatggttacgccaagagcgtgccataggaggaactcatgacagcccattaatcttgctttttgatttttttttcttcgccgcatgtatttgacaagcttccgtttttcccatgcttttaacagtctgggccatggcccgatattcagtaatagcattgcgatttcccacgttattttattctcaccgcagtaccgtcagttattccctttcccccacagtcccgagcctgccaagcgtctgcccaggcggatccattcgagcttcagggtcttcggtgaggaatgtagcatcgccaagacacgatggcaaatcatctgcaactatgttcccccatgggattgaaggtgagtcttcctgcagatcactcactgccttgtcagcttttagctttgcccatggggtgcggtggtagattagtattggacggttgtatgagatgctgtaccgtccccactcttcttacacgtcggctcgaacaagtaagcataatccactccgtacttttctttttttaggctttgagttacctacggaactactgaggtatacaatgtaaaacacagggtttcacagttccgacgagcccagcctgccgaattccccctcggcccggacagatggaaacgctcaattccaccggcggagacttggcacctaacgcggggaagaatcttacagccagcaagggttactggtggaaagaagggagtagatccctccgtcggggatgcgatatcatgcagaagtgtaaccagaacagaccagggttgatcctgatgaatccatgccaacggcttggacaaacttccaaggtgggggctggtggtagaggagtgcctcgggcggtgggtttccgtcgggattgcgagtccatgcagaagtgtgaaggggttgacgccaatggctcgggggaaattccaggttggatgctgatagataagcgctgccagcggtgattgcccagctctcatctctaaagcggaagcttatcagccaagagaagagaagagcaagggtgttgcaagtttctctgggcactgcaagaataaggtagaccaaggtagatcaggtttgcatttctcctggcttatggtgccaacaatggaagagctcggggtgttcagagcacccttgacacggtgggaataccaatggcgttggcatgtcgcgttcttgcgtaagatccaccagatagtcgtacctgtcatactccgtacaagcgggagatcccccgggagtgccaagtggaatggttatgagattgaattcgggatgaggtgaggaggggcgcttaatagtggagaggagccgtaccggtcgtaccgacacaaatcaaatatcgtcataggattcataggatcccctatcggcccgccaatcctttttaaaatcgttttagtggacgcatgaccggttggagatttccaatcttttcaatggaaccctggaaccttggaaccttggaaatgtctggacatgagtcagatcgacccctcctatctaaccttcatacatggaggtcggtggtgaaattatgtcgatatcgactcggccacttctcccctaggagacagagaggggaccctgtgtccatcgaattggcccgatccacttctcgctctgcacatgtgtttgtcgagagttctccgagtctcctccggccttttccctcgtctagttcccgcgaatatccgtacagttgggagttgaaggatcaagggcttcgtgttgttccctagatgctgacgttgatcccgatggcccgaggtagattggcggaataagttacctaaactacccgaagttatcgtgcgaggattatgagttatcgtgcgagaggaatcgtccggggtaagttgggaatgggaatgggaataataggaacattggttgtagctagggttagtatagttcctttatgggtatagatggtaagccccgcatagatttcgttatgcttttagcaaattacatttctcgaattggatatattcgattattgggttatcctattcttattatcctattattatcctattcgatttgatcattcccaatttctaggcattggtcccggtgtaccggtgaacctgtatgtacttgttacctcattcctggagtcaatcctcgcgtctcggcaagtacctgtgacttggtagatcacacttctgattcccctctttatctaacccccctcccacctcccaaccttcttgtcctctctttttcttcccccccttgtctttctatttcaccctttaaatactatcctatccaatttctatacagcttccattgcttatactgaagcacagtgcgagcgattgtgcagtgatctgccgaaaccggcctcaaattggacggagagctcccccagcttcttatagtgagtcaccgcctctgctttccataccggacctccggaggaagctctagagtcgaacctcacctaattcactcctttcaagtaaacaaacccttgtaaccgatctctcatctcgtcacatacattcacaatggctgccccgctccgccagacggataaggcggttgatgagtccgacatcctcgaggatcacaatgagcaccaccaggactcagtccaccgtcgtctgcgggccaactcgactattatgcacttcaaaaagattctggtcgccaaccgtggtgaaattcccatccgtatcttccgtaccgcacacgaactgtccctgcagacggtcgcagtcttctcacacgaagatcgtctctcaatgcatcgccaaaaggccgatgaggcttacatgatcggccaccgaggccaatatacccccgtgggggcttatctggccggcgatgagatcatcaagatcgccctggagcacggcgtccagctgatccaccccggttacggtttcctttcagagaacgcagactttgcccggagcgtcgagaaagctggcattgtgttcgtcggccctaccgctgaaacgattgatgcccttggcgacaaggtttctgcccgcagcgccgctatcaagtgcaatgtccccgttgtcccgggaacccctggtcccgttgagcgctttgaagaggtcaagaccttcactgataaatttggcttccccatcattattaaggctgcctttggtggtggtggtcgtggtatgcgtgttgttcgtgatcagtccgagctgagtgacgctttcgagcgtgctacctccgaggcccgcaccgccttcggtaacggtaccgtcttcgtcgagcgtttccttgaccagcctaagcacatcgaggttcagcttctcggtgataaccagggcaatgttgtccacctcttcgagcgtgattgctccgtccagcgtcgccaccagaaggtcgttgagattgctcctgccaaggaccttccgaccgatgttcgtgatagaatcttgtctgatgccgtgaaactggccaagtcagttcggtaccgcaacgctggtaccgctgagttccttgtctgtggcaatgagcactacttcatcgagatcaaccccagaattcaagtcgagcacactattaccgaggaaatcaccggtatcgatcttgtggccgcgcagatccaaattgctgcgggtgcaacccttgaacaacttggacttacccaggaccgcatctctacccgtggtttcgccattcagtgccgtatcactactgaggaccccgccaagggcttctcccccgacaccggtaagatcgaggtttaccgctctgctggtggtaatggagtccgattggacggtggtaacggcttcgctggtgctattattagccctcactacgactctatgctggtcaagtgcacttgccgtggctcaacctacgagattgtccgccgcaagatgctgcgtgctttggttgagttccgtatccgcggtgtcaagaccaacattcctttcctggcttcgctgctgagtcaccccacattcatcgatggtacttgctggactacgttcatcgatgacacccccgagctgtttaccctcgttggcagccagaaccgtgcccagaagctgctcgcttacttgggtgacgttgctgtcaacggtagcagcatcaagggccagatcggtgagcccaaattcaagggcgagatcatcaggcccgttctcacggatgctgcgggcaagcccattgacatctccaccccctgcactgagggctggaagcagatcttggacaaggaaggccctgcgggcttcgctcgcgccgtgcgcgctaacaagggctgcttgatcatggacaccacctggcgtgatgcccaccagtcgttgcttgccacccgtgtgcgaacaattgatatgctgaacatcgctgctgagaccagctacgcattgagcaacgcctactcgctcgagtgctggggtggagccaccttcgatgtggctatgcgcttcctctatgaagatccttgggacagacttcgcaagatgcgcaaggccgtccccaacatccccttccagatgttgctgcgtggcgccaacggtgttgcctactcttcccttcctgataacgctatctaccacttctgtaagcaggcgaagaagtatggtgtcgatatcttccgtgtcttcgatgccctgaacgatattgaccagctcgaggtcggtattaaggccgtccacgaagccggtggtgtcgttgaggccaccatgtgttacagtggtgacatgctgaaccccaagaagaagtacagcttgaagtactacctggatttggtggacaagatcgtcaagatgggtcctcacgttcttggaatcaaggatatggctggtgtgcttaagccccaggccgcccgtctgctgatcggttccatccgcgagcgctaccccgatctccccatccacgtccacacccacgactctgccggaaccggtgtcgcctccatgattgcctgtgccgaggccggtgctgatgccgtggatgccgctaccgacagtctgtctggtatgacctcgcagcccagcattggtgctcttcttgcttcgctgcagggtacccagtacgaccccaagttggatttgtcccacgtccgcgctctggacagctactgggctcagcttcgtctgctctactctcccttcgaggccggtctgaccggccctnnnnnnnnnnnnnnnnnnnnnnnnnnnnnnnnnnnnnnnnnnnnnnnnnnnnnnnnnnnnnnnnnnnnnnnnnnnnnnnnnnnnnnnnnnnnnnnnnnnnnnnnnnnnnnnnnnnnnnnnnnnnnnnnnnnnnnnnnnnnnnnnnnnnnnnnnnnnnnnnnnnnnnnnnnnnnnnnnnnnnnnnnnnnnnnnnnnnnnnnnnnnnnnnnnnnnnnnnnnnnnnnnnnccgctgaccccgaggtctatgagcacgagatccccggtggtcagttgaccaacctgatcttccaggccagccagttgggtctcggacagcagtgggctgagaccaagaaggcgtatgaggttgctaacgagttgctgggcgacattgtcaaggttaccccctcctccaaggtctgtggtgacttcgcctcctggatcgtcagcaacaagctgtccgcccaggatgtgctcgaccgtgctgatcaacttgacttccctgaatcagtcttggagttcttcgaaggtctgatgggccagccttacggcggcttccccgagcccctgcgtaccaaggccttgcgcggccgtcgcaagctcgacaagcgccccggtctctacttggaacccatcgacctcatcaagatcaagaacgatatccgcgagaagtacggcgcggccaccgagtgcgatgtcgccagttacgccatgtaccccaaggtgtttgaggattaccgcaagttcgtggccaagtatggtgatctgtccgttctgccgacgcgctacttccttgccaagcccgagatcggcgaggagttccatgtcgagctggagcaaggtaaagtcctgatcctcaagttgctcgccattggtcctctctccgagcagactggtcagcgtgaggtcttctacgaggtcaacggtgaagtccgccaggtcagtgttgatgacaacaacgcctcgatcgagaacctcgcccgcgccaaggccgaccccacggatagcagccaggttggcgctcccatgagcggtgtcgtggttgagatccgcatcaccgatggccacgaggccaagaagggtgatcctattgcggtgctgagcgccatgaagatggtatgttgttatttcttttctattacatataatttgtggctaactcccctctaggaaatggtaatctccgccccgcacagcggaaaggtgtccaacctccaggtcaaggagggcgactccgttgatggccaggacctgatctgcaagatcagcaaggcgtaaaagcatagcgactctgtactacgaaccatgcacaatttgtgatgcgtggtgtgatttgaatgttttctcagcgtctttagtttatgtttttcgagttcatatctgaatttaggtttattcggaatcaaacagtatttctgttcaaccatttgaaagttcttagtacattcacttgtaggtctattcccacgcttctccccattctcccgtctttctcccgagaacggctttgaaaaattcgtcaatttacggctcaggttgataactatacatttctttggtataaatcttcttgtttctctgtgctggatataataggcagcaggatagagcactcagagcactgttctagccacctgtacggtcataagtacttatctatctatctaggaaattaataccccggccatcgtgcgggtcaatttctccccactataagaacgtcggcacatccacatctataccccaactaccccaaatcaaccatcaacagaacataatcgaaatacaagatggaaaccatccgccgtacttatctcaaatccctcgctcatcgcggcataatccaaggcgtaacaatttcgacattgtcttctcccagccaagccaaagacctctgccactacttcggcggtgtccgctacggccttgcccccgccgagcgctggcgccgtgcccagcccctacccgcatctttcacctacggcagcggagaagcgccaggccaatgtgatgggggtgcagggctttgtcctcaaccaggttttttgaatatctcgcctgagaatccggatgcgtggaacgaggattgctttcagtgtaatgtttggacgcccattggagaggcgcctgaggggggatggcctgtttttgtttttattcgtgagtatcttctgatcagacataggatatatagtttcagacttggaatagggcaacaggcttctataaagatcgtgctgactggtgttgtccgacgcagatggcggatggcttcaattcggctcgcctaattcattcaatgtggctgcattgatcggcgaggccgacttcgactgtgtggttgtgatgcctgcgtaccgggtcaacttattcggattcctctactcagcagaattggaggaggatgcagctactgtcggagagacagttgggaaccacggattctgggatcagagattagcattagagtggacgaaggagaatatccagctcttcggcggcaatccggatctcatcacgatctcaggatattccgcaggcgccaactccgtcttccaccaactagcctatgacctccgccaaccagacgagaattctctcatccgccaagcctgcatctggtcaaacagcccagccgtccagccaaagcagccaaccgaaacacaaacccaattcaaccaactcctaacagccctggacatccccctcactctgccacatagcgagaaacttacccgcctacgctcaacccccgcaaaaaccctcctcgacaaagcaagaacaatccagctccaccaattccgcccaacaacagacacatccttcatctccccgtccctcttcacgaccctcgacaacggcgccttcgcccgcagcctcctagcccgcaacatccgcatcataataggtgaatgtcgcgacgagcgcttcctttacagcacatggttcccgccgacagacaacacgctctccgcgctgcgcagccgtctcgtggcagattaccccgaacacatcgtcgacgccgtcatcccgatatattacccggacggctgtctaccgacgaactgcaagaactgggaccaggacgcgtgggggaggatctacgctgatatgcaggtgcatcagatgcagcgtgggcttgtgtatgcgctgacggagaatgaggccggggttgatgcttcggcgttgctgtttcggtatcggattgagtggcgggcgaagtgtgtagagaagactttgccggttgagtggggggttacgcattcgtcggattatccgatttggttctttgggaatggtgggttgttggaggaggaggagaagagggttgtcagggaagggcttgttgggccgctagaaaggtttgcttgtggggagaaggaattcggatggggggtttctgggaccaagggcgttaggacgttgaggggggatgggagtgttaagattgtggaggatgcggattgggaggagggtgttagggtttggaagggtttgagagatgctgatgagaggttggtgtgatacctacaggtacatagttacatacgtagttatgaggtgcaagtatagacgccacggaggatataccggataccctaaatataggtagcttcgaccttgatatctttcaaactatatgccaagctttccccgcattccaactacgtcaaggctctccggggtacatcatagcttatcagtctattacaaagcacagtacatggcgtagtgaaatacctgtagtgcatggccatacccaatagtacaggtactggatataataagtaccagtcttgaccttggtaacggaactagaccagtccaaattcaatcagcagacggtgattcaccacctgtaacgtagtaagctgagtatgctcttataggccatcttcccccctctggccttggattatctcttcctactcagtttaattaattcaagctaatctgcgagaacattgaggtatgttccattttaattctcacctattctatatcccatctatccccaaagggcaacctgaacaagaatgacgtcgtcgattcccaacccttaagagacatcatgattagtatttccttggtttctttagaattccatgctctcactcttactatactaaattcccccagaagaactacaaaccattacggactataccagctgtctagacatctccaacatgtctgacgacacccgccgcaactggcacggaagccccggtgaccgtctcgagcactctaatgtctggatgagtggcggtgccaagagccctaccggtcgtgctgcgtgggcgatgcctataacgaacaataggagggtatgtcatttgcctcttgtggatttctattatatatcgtccattccccttagcactacatcatctatccatccataacacatctccaaaaccaacctaacatccaaaatgaaggactccgacacatccacatccacctcgaacggaaaaccagccgaaggagatacacctaaccccccaggcttaggtgagcgtcgccgcagctcggccggctccaacggcctcttctcgaatctgcacacacagaagcgtgaatctacaaacgcggacatggctatccgccgcgcgagctggaatgaacaggctgctaagggaggcatgttctcgaagtggtgggagggatacactcggggcacttgaagcaattgtttttgaacttggatcttttgcgtgggcatttgtatactcgatatcgggggttggttctggagatgagaaaaaaaaagaaaaaaagaggaatactggtattgggttttgatttagttcggtgcttgtaggcgtgtgaatttcatgatcactcttaattgtttctttgattttctttgatccaggctctccttgtgtctttctctacaaggagatactcgacgtacctgagactgctcctttaaatgtaaggtactgcatctgatccaacactgtcttttctacctctaatccatgaccggcacttgaaataaaacgactgctattgctaattcgagacatacatttacaagcctaacataacatccagcagagtatgacagagtcctcataaatggaaccaacaactactctggctgcaaatatgaacacggatttcacatcattggactgggagctccaaagcccaatttggcaatacctcatcccatggttgtctcccaacctttctcaatcataacatcaacccaataagtatcatcgtccccagcatccaacctcctccatacttcattaaccaacttcaagcatatatgaatcggttttggcggcagaacgtgcaagaaggacgttaaacggccaaggatgaacttgcgcgtgcgcgagacttcaatggcctccattgagatggtaggtgtctgattcgggttgtaactatctttatccctgccctctggataatcttcgccattccgggcttgagtgccagcatttgtggccagacgcgggagacggagctctgagcaggacgccactaggagaaatggctggaggcagcgggtacgtgattccaggggtatggtttttaatcgagagagggttgtcacggcgaactcggtgagccagttgctatataggatttcgggggtcggagattgttgggtatctggtgatgacggagatggtagattgtgagaggaagatcttcgagacggcgaagcagcggtacgttgagacttggtgttttgtcctgttgctggactaggacccccgaatctagctgacaggtccatgctgtcgaggtcaatggggaagaatgggtcgcgggatgctgcatcggcgttgtcagggtattgggatgttgtggatattggggtgggcaggcgtttgtgcagtaggtctgggaatacgcggtataactgcatgagaccgacgcatcgatatgcttcggccattgtcaggaggtgccatactggggtatcgtcgtcaccaggactgacaatctcggcctccgagggatgagcgaggcctaggaggcgttcttctagctcgcgggctttctcgattgccaactgggcacgggtgatatcatcttgggaggtgaatcgccttgagcggatgcgttttcgctcacggcggatgagttgcccgacctcgtgcacggtgaactgggtgtcgcgcgcgatgccggtccatgggtgcgggacccgttgtagaacgaaggactcgccaatagacgaagcggtccgtgaattgttagataggaccatcgtgtcattgtctgcgacgaaggaaagcagcatctcccagtagatgagagcttcctcgaagaaccggtaattattgctgtcgttcttaggtaagctgaagctagagccgttcgatggtgaagagatggtattgagctgcttgcggagcaggttgaaaaatgatatacccaagtcatttgggtcgtgccaactagccgtttgtccgagcattagcagcgccagcaaagacttgtcgtctatcactgcttcgcgcgtgattatatcaacagcttcatcacgcatccttcggcccatgggaccgaactgaggaaattcggtgaccagtgttgcagcagccatgctttgcattgttcgacacattgccagtgaagatccccaaagacgggataccgtggttcggaaggggttcatctggctgtcgtaactagagaacagtcctgccacttctttgaaatagtactcgatcaaagtccatgatggattattcagtggacgagatatggacatgaagttatgtgatgaggggcggtgcgatgcaggaggataactgcgcacaatggtcgaaggtgagaagtcgcggtaaacatcattctgttcctcactttgcgttggtccaatacgcgacagaaagtgtgacaggtctacaccgatattttctgacacttcaaagtcacggaaagtgtctctttggtgtgtgaaagacggcgatgccggcatcggggacggtgagcatagatccgtcagttcgggtaaagacccatggctcggatgttcccatagattgtcacatagagaagttcggctatctaagacgaaatttggaggatccggttcatgcgtctcaaatgttgaatcctccggcaaagcatcgtcgatttgggttaccggctggctaggaccaggcgaggcagaagccgcaggacttggtgttctcacctccgagatcgatgcgggtacggtgggactagactgctcatacttggtaacccagcgcagggattgtgcataaccaggacaccggacgcccaagcgagtgcagcgagtgcagtgaggtttctcttcgccgcatttgacctttgcatgttagtgatatccgaacgggcggggacgggaaacacaaacccgtttactcttgcatcttgcacagccatttctagatttcttaacgcggcgcattataaagcataaagaggatgaatctgaggagatccggcaacattcaagatgcggagtataggctgagggggaaaatcgttgagaatcggggcttatctcgataaacgggattcttttgcccctttgggcaggtgaaacaagagaaatgacgatgtctgatttgatgactgtataccatatggaagactacgcgaggcatctacatagtacaagtgtacggagtagtaaaatcataaaacaaacgtctatactctttactattgttttgaccttccaaggggtgggaaaattcatgatgactcagccacggcgtttgaggtcggaggcttggtgcttggcaattgatatctacacctggacaagactcgatcatggcatatatagtgcgcagcaaggtaagtataagtccaaatgagcattcaagaagtctaacattaacataggtaaccacagtaccttttcaaagacttgcgactttcaaaccagtggtgatcctggctaacggcctgatatcaaccccgagtctccatacaaatcccactggaaggcctcaattgcagagtaattcctgcagaagtaactatgctcgcgaatttcactcaactcccatcacaatgtcaagcaactccgaactcaagcagactttgataccaagcctccttgatgacgtgcacaagttgtggttcaatcacctgagctgcgaagaggccctcatcctacccggatggagcgagatggggaagtggttctctcgtgacgaggcttttgataaggcctgcgtgtaagtgaccatttgccctacttgaaccccatagaagattaacgagctcaaacagcacccaattctgccctgccctagaaacaatcgttggctccagagcatcagcttcggacattctatctgaagtcagcctgtcctcgccgatggattggctcagcatcattcttctacttgatcagattccccgcaattgctaccggggagcagagtcgaagctagtgtttgggcgctttgacccattagccgaggagattgtccttcgagcaattgaggaagaggtaccgatccgatcgccgtatctcaggtaccacatggcttaccgtatttggttccatatgccccttatgcattcggaaaacttggctatgcatgagctagccgtcaaggtgcacgaggatatagccagagatgtcaataagcttctggccagggacgcatcggctcttacggaagaggaaagaaaatgtcgtagcattctatccgagaagagagaggcactacaggcattcttgagcaatgctcttgattttgagaagagacataaagtgatcatcgagcggtttggacgatacccgcatcggaatcaggcactgggaagagtgtctaccccggaggaaatcgaatacttaaacaatggcggggagacatttgcgtgaagccaaaccgagtttgtatatattcacgaatacgcacataatagtaatatgatacagtattgagctacgggggagccagtctccgcagacaaaagcgtcgaattattatttcgcaatagaaattggccaccctacattccaatgaacgatttggaattccgtcccaaagcagtaaatgagcacctgccctttcaccctttcaccccttggtagctcgcctgacccctttcctattcgagcagaggccacatacctttcttattcgggtgttgttgaagtgtacataaacaaacaattgaacatcaagccggtttcagatagtgaaacaatgaccagaataccgcatctgttacagagatgaagttgctctttctcatctggatcagtaacaggccttgctaacactaaacgcacaattcaaaatcatagttcgaccatcattactataagtgctgtctgatagaactgaacgtggattcaagaaaggtgaactggaggcaacaatgggaattttggtcttcccagctctatctcattcatcatgattataccacgccaatcttctatcaggcccttcattgtctcgctgctggttgtctcagtgatatcctctaaagtgcttcatcttctccaacatgcgttttctcttcccggcggtcaattcgcaatctacttcccgacattcttcatccttgagacacttttatgcgtggctgcgtgggagttgctattcaaatttacggggttgaagtcacttttgggcactgcagtgacagtggccataacgtaagtacttctctgcttctaggtagaattcaatgagactgatatactgactgctacagggctctgagcttcgtcttgtcttcatctcaaattgggttctatcttgtaactggcagtgagatccgttgggatgcagccacagccgttggaactgatccagaagggagaaagctgatgctgagcgggctgagatcctttttgggagccgcatgcgcccttcttgtgatttcatggctactcaaatattggatatatgttctcataggccattggatgtctgcactatttagcgcacaaactgaaaaggcagacgaagaaggcatcgtgaccagccctcaaagaaagtcgcggacagcacgactcattcaattttggacagtatgcgccgcggtattcattggattcttgcgcttggctcggccccaggtgccttataaccatatgtctgagactatcccattcagctttttctgggctttgggttcgaggcctgctgagctgcatcagactggagatcaatcatttccgctcgcagacctgattgatgagccatactgggaaggtccatacgatcacttcaagggttgggccccaggaaagccagactccaacgcgaaaaagagtcgacccgtatgggcgtctggggatttaccaccagggttcgaccggtggagtgaagcagagtccggcgatgaaggagggggcgttactcttaatgagaacggggcttctcagaagaatatttatcgtcccacggatgaccctctccgaatcaccaacctcaatcgtgaaatgcttgagcccatagctcaggttctcaagaaacatcaagttcccattacacatgtcgtacttgtgttgatggaaagtgctcggaaggacatatttcccttcaaggcaggctcacatctgcacgagatgattctatcgtcctgtaatacccaagaccccgaagtactccaagaggtcaacgacaaattatcaactttgacaccaaacgcagagaagttgaccggtgagacgagtggactttcgacaagtaacaacatttccagcccctctagtggatggaatggtacgacggaaccaggaatgggcggtatcaatgttaacggtgtcctcactggtagcagtctatcgttcaaaagtgcagtcatgaactactgcggcgcgggccctctgccggtgaacttcatggaggaggtcaacgccaaaaactaccagccgtgcattatgcagatttttgaattgttcaaccaacttaaaaagaactcgactgagaagggcaagcctcgaaatgggtttgagcacattcatgatcgaaactggagcactgttttcttgcagtcgatcacaggactgtatgacgagcaagatgagctcaacaagcagatggggttccaaaaatacatctatcgcgaagatattggccagcaaagtgccaaatattatcacgaagacatggaggagatcaattactttgggtaagtattctcccaccgactgagcatctacattcacattgctaatacgttacctagatacccggagtacgagatatacccatacctgcgagatgtggtgaacaatacaatcgagaacaacgaacgactttttctatctcatttcacgagcacaacccatcacccatggggcacgcccacagcataccacgaagaggaatactttgccggagacagtctcatggcgaagcacgaggacatcaacaaatatctgaatacggtccgatacgtggacacatggcttggcgatatgatgaaggtcctcgacgaagccgggattgcaaacgagacattagtggtattcgtgggagatcagtatgttgcgccagcttcagtaacttcgcacaacaaccaaatagccatgtactaatcccaaacagtggccaggcgttccccgaagatgcgccagtctctggtacatatgagaacggacatatcagcaatttccgaattccactcgttttccgacacccgctgttgcccgcattgcaaatcactgcgaatgcaacctcgatgtccgtcgtcccgaccattatcgacctactcgtgcactcgggctcgttgaacgagatggattccaatgcggctttagacctgataaatgaatacgaaggacagtcattgatacgcccataccaagctactcacaatggccgacaggcatggaacttcggcattatcaaccccggtggtacaatgctcagtgttgggtctgcggcagtcccgtatcgactcatattgccgcttgctgaggactttgagtacattttctctgatctagataccgacccggatgagttaagtccattgcgtgggtggtcccttggggagttgatcggccgtgtacaaaggaagcatggagacaaagccgggaagtggctggtagacgcggagaaagtggggaaatggtggattgaggagcagaaaagactgtggaattaccaataataatgcaaataaatctgccattcaagaccctaggagaacagagaagaataggaggagaagcgggttgccttgatattgttcggtttctttgtttgcgcctgaggcagacacatccgccccacctccacttcatgttttatattcgttgcatttcgcgttcggtcttttatttggactattatcttttcaacagcttgattgatcgagattgcacccttagctctcggcagcgcagagccttaagtctggagacctaacccggactcatcctgtgcatctggcccctgtacccccactatttgattgcatcccaacaattattcttccactcagaaagtttctcactgcaatctccaacaaatcatggagggaaaatattcgaccgatcccgagtgggcatctgtcaccccaattgacctggacgatggttcgagctcgggtgccatgccactggcgaccatcgcctacccaaccgagtacctcgaggcgacctcgtatttgcgtgctgtgatggccgcgaacgagaagtctgagcgggcattgaacttgactaaagatgtgatttcgatgaatccagcgcattacaccgtatggtaagttggctagtaacagccttgggacatgccaatatcgacgtctgacattctatacaggatctaccgagcaaagattctctttgctttggaaaaggatctagatgaagaattgagctggttgaacgatgtttcattgaagtacctcaaaaattatcaaatttggtatgtcgacaccaccaacaacagaggagccgaaagaaaaagccaggaaaatataaataccaaaaacaaacctaacatctcaaacaggcaccaccgccaagttctgctatcatcaaaagcacactttccaaccttcccacccaaagaagcagacttcctaatggagatgttcgcccaagactctaaaaactaccacgtatggacctaccgtcactggctcgtgcggcacttcggactatgggaccaaccgcgcgaactcgaagacgtggaattcctcttgaaagctgacgtgcgcaacaactccgcctggaaccaccggtacatgctccgtttcggaccacgggacacatcggtcccagacgcggggatggtgaacgcgggtgatctttcgactgcgccggccgataagggcaggctgtctgttgtcgatgaggacttggttgatggcgagctgaagtttgcgcaggaggctatcctgcgcgccccggagaaccggagtccgtggtggtatgcgcgcggtgtgctgcgggctgctgggcgtggattaggggagtgggaggggtttgctggtggatttgtttcggagggggccgttaagagttcgcatgctgttgagtggctggcggatgtttttgctgaggctgggggggaggaaaaggctgtgaggatgttgacgatgttgaaagaagagtttgatcctattcggaagaattattgggactatcgcattaggaagctggatcaggctgtggcttgatttgaagaaagacactacgccttgtgctgaacaacttttgtcggataatttatatctgtttatgtacctttcattgaaaaatcgtacgtctaaagctgattctgcttcgaattaaaagactgctggatacactgtatgattacatgaacgatgcgaaagtctagacctttatctagacggtaattaaaatgtccaagtgtagtgctgcaaatcaaacgccaaaaaacaagtcaaaaaaagtatcgaaaaatgaaatatatccatcatcgaaattcaagcccatccctcatccaacatcctgcgccattcactagccatatcgatagtgacgttgctaccgccgcagacaatgatgacaattctactctgcgagttgagatcaggaacaagttgcttaagcttcgaattcagtttctcgccgacttctggctcaacctcctggtctgtctcattgtccgtcgaggtcgaccggtcatccccatagccctcatcgcggtaagtaatatcagtctcatccaagcccctcttccacttcgatgtaggaacagcagtagcagcatcgccgatggccgcttcgatacagacaccgcacgcaagctcgacgaggagtcgttcatcgttggcgaggcggagcacgccgcgggcggcgtctgcatctgagagcacggcgctgtgcaccttgatgcctgggggcggggacacggcgtactggaaagttgtttccgagacgcggacagcaccgagagaagtggcctgggatgtgatccttgggagggagatgagggatttattggcgatggctgctgccagtgaatcggtaccggccgtttcaatggcgaggagatgaatggggtttggtgtgggtgaggaatatgaggtaatttgcttcttctgtcgtcgcttttcgatgcccatgacgagtccattgagaaggccgccaccgccgacgctgcagaggatggcgtctaaagggagggcccggtcattgtaggcttttttgtcttcgggggtggtggcgggaggaagctgggtctcgagctcgtcgatgatggtgccgtttccttcccagataggctggttgtcgaaggggtggagggcgattttgatcacatcctggtcattcccgctgcttgtcttcatgatagtttcccgcatgtattctcctgcttctgaaaatgtctcgccatgccggatgacgtctgctgcacctgccgcccggatcttgtcaagcatcaagggatttgtgcccatgggaaccacgacagtgcatgggtagcccaggctccgggctgcacagacggctgccagtccggcgtttcctccggacgaggcgtagaaatggactctgcggcccacgttctctgggttgcgaaggtgagaaaggatttggttgcccatagcacgggacttgaaggagccacttggctgcacgttctctaactttaagaagatcctacaaccagctgctcgagaaaggcatgcagactcgaccagtggtgtctcaatccatggcgtcttgaactgcagctgaccataggcggaaatgtcgatgctccccattttgatgtgttgaacaaatggaaaaagaaaaaaaaaggttaccggagcaattccaagaccagaagtatagagatgatgttccccaaatagtatattgttgagtcgagtggttacacgacggtaggttgtaaattcacgaaaatagagatagggagatatcgggaagaaaagaagagcgataaatactgaaacttccaaactccaatatgcagatatgaagatatgaagacatgttttgatatacaagtgagcctcaagggccagtacaaaagctttccgacgggaaactagagtttcccgtctgataggactgatcggagtatccggttctggcccagcctttcccgtcgatagccatgtgggtcgttcatgacgaccatgacataccgtctgtttagaatggccgggcgtgggaaacctggcgtctcagctttcgaggtgtggaggagggggggaaaacctcatctggtctgccgcatccgagcggagaagatgtatatctttattcagacgggcgtctcggccgcccatgattggccgccgatcgattcctcttatcaaatcgaaagctcaaaaacaggcggattactcctcagtgagcaaaggagggaaaataatgcctttcttaacgccctcgccgtaatctgaatccgaaccgtacgccgtggccgcgaatgcccgcttggaggggtccgaggtgtttacacggagcaattctagaaggtcatgagacttgccgggcatgaacggttgcaataaaatgccagcgatccgcagcgattccgccacgttgtagatgatccgttgagggttgggagttttccacggttccgacgcatggaagtacttgttagtctacaagcaggtcaatactcgccgaatccatgcggggatgatcacctcttaccttctcaataatgctcataatttcgtgcagcgcggcacgtgggtttagattctccataagctcggcaacctggggaggcgtctgggccaacatttcctgatgttccaagtcctcaggggtagcagctggaagtttacccgatcgggcgtccataatgtacgagcgcaaattgccacgcgcacatccgattgtacgcagagcaaggtttccgagtcccccctgaagcaatttcttgtaatctcggatgatgaaggaattgtcaaagtccgcatcatcggcgaggccaccccggtacgctaggaagaatcgcatgccatcgactccaaaccgttcaatggcgaaaaatgggttgacaacattgcctgtggacttggacattttttcacgattcatcgtccagtgtccgtgcaccaagacgttccgaggcagaggaagatcaagtgccatgaggaaagcaggccaataaacacaatggaacctgccaatcgattaactctgcacccggttctccagctgaactcatgaactcaccgaacaatatctttgccaactacatgcaagtctgcaggccatacggatgtgttgtcttttccaggtgggaaaggatatccagctttggtcaagtagttgaccagcgcatctagccacacgtagattgtctgcgtgtcatcgccgggaacacggatgccccaagtcagacgttccacgggccgagaaatcgagagatcctgcagtcccgactcaactccgttgatcacagcagctgtataggaggtaggggtgataaacggatcttctcttttgtacaagtcaagtagacgatccttgaaggctgagagacggaagtggtagttggtttctgaggaccactctacctctttacccgtttctattgagacctgtgtggtgttagtattctttctctttgaaaaactgataaattacataccatgcgcttcctccctgttgatggatccagggagttctgcacttgcgtctgtgggtagaatgtctcatcgctgaccgagtaccaaccttcatgcttcgaggtgtagatatagccccgatgttgcagcatttcctactaattatcagcgtgccctactatgaacggagcatagtaacttacccagaaatattggacggcatctcgatgcgccgggtcggtggtcctgatgaaatgatcgttgtcgatgtttgcagccttcgctagggcctatatcacaaattgagttggagatactcttgaatatagcaaaggggactcgtacctcaaaggtccggcagttcatatcgcaaaatgcctgggtatccatgcccgcttgaatggcagcttgttggatctgcgatgaatgtcaacgcccattatcgaactgcaatcccatctgtatgtaataccttcattccatgctcatcggttccggtcaatagttgagcatccgtgttcccgagtaagacctgccaccgtttcatgatatcggcgatcaccattgtgtataaatggccgacgtgaggggctgtaaggaaaacatattgttagaaaatcagtttatacatggtattcactacggtgctcaccggcgttcacgtagaaaattggcgttgttacgtagtaaggcttggacctttgcggcgtagttgcaactccgcgccggggggttgttgcccatccatgcttgcaagatatacagttccacggatttcttgatctcagaagctgagacgctctgaataacgagcgaagtgacgtccttgctgcagccattgggatattgataacggcaagaagagcatgacatgttattccgcacatctcgggtggtccaagcttctccgcaagtcacggccttttttttgcgcctacatcatcgcgcttacatcgtcatcgagaacacccacgaccttatcgtcgataagtatatattattcatttctctcatttaaaacattgtttgaagcatacctctacatcttcttgtatcacgcacaattattcccgggttttctttggcgtgaaataccgatcgcgatggctacagcaagcgaggatacactgaccaaagtgtcgaccgagggtaagtctcaaattataagttaatttcatgccttgaactgacatttgcttgcttttgtgttcagctgcaaccgagttcattaagaccttctatccggctttgggatcaaaccgtgaatctctcagctcctactactccctcgagcctacaaccatcctgttcaatgggaatcgtgtcgcagatggcgctgctgtgcaggaaatctttaccaatcaaatgtcgccaacgtactacgaagtccaatcatacgactgccagatcatcaacaaagcataccccaccattttaccgggtggtggactgaagccacagtccgagatgggagtcaaagacatgtcatttctcattgtagtcagtggatttgtccgctatggcgagggtcgcgatcagccgcaacgcggattcagtgagacatttgtgctggtccccaatccatccgcagagagggcgaggggccgcaaggattggctcatcgaaagccagaacttccgccttgtggtttgaacaattattccaacgaatcatgaatcagcttcaagtcaagagactatgcatgtgatacagaagtgaaagacaactgagtcatacccacccaccaaagatgaattgctgagagatacacgatgcaaccaacgatccactgcttgagatttgcttcaaaactagagcgccagacgccagaagggaaggaaaatgatgatattacccctattatcagggggattatggcttagccgatgtcttgcgcggtatgcggaggtttgctttgactctttcaagcagctcctcacgcgtcgcagcctcactcggtagaagccctctctgagataatcggtcagtgtacgattcacaagaatgtatgattatctgaacacagtcatgtccgaacaaatcactcaaacataccgctttaagccatcttcgcatctcatccattgtccagttttcagggtctagcttccattagcccatgttagatacctaataataattactcttaccaccggtgggatctgcttgtgcgggaaggacatcgctgcccaagatagtataggctgccactgcagtgaccattcctgcgaatcctacataggaagatagtggtcagaaaatgttgccaagtgccttgacttgagatcgtctaccgaggaatagattctatcgagtccagtattagatatctatcataaaagtatagacagacgtagtaccttagaatgcaatgctcggtccaaaggggtcggcatcttgaaaatgatgcggtgattatttgaggttcttgggttgatgcagaagtattgtttcttaatcgtcaaaagagaagaaataaagaagaaaagtatcacagggcacgtgcaaaagacaagtattcaagacgaatagatgtgaacagctcgtcaagacgtgggttgcaccgccacactaacgccaccactgctgccttggaactatacagttgcacctacttcaactacatatcttcgataactcccaagttcagttggtggcactttccatgaactaattaaatacgtaaatatagacttatgggtattgctcaggtagaaaatgaaatgtgagcctaacaactatcatcagcatcgcatatctatacccaccagtccagcatggttaccatcattcattttgaaaccccttgaacagtcgaattaataaacgacatggaagcagtcattttcctgtcttcggttacattcgttattgcggtgggagctgccatcaaacaagggtataattgatcaccattgcagtatcgagtcagacattgattccatttacagcatagccctttacagacgataccgagtccacctacatgtcacatcaaaaggcatgactcctccgcagagtgtggacctggagagattcgatactcaaggaagcacacccgttcagccgccgccgaaactgcatcaccattcacgattggagagcagaaattcaagatggccaggatatactgaccgacgaagtcaaccatcgcgaacaatggtggaccattttgcgtcatatcgcattcctgaggaagcagagacagggactgttcatcattacccgtattcgcattcgctgccccccaatcttccagccacatttatggccccagttgcacgagccacaacaccaccaccagccacttcagttaccccgcctgaggcaccaactgtagctcatggctgactaagcaagggcttttgcagcttaaagccctaatgtgatccgcacacattcaccttagaggctagtgtcgacagtgagctttctcttttgcaccttgcttcaaaacacccgcaaccgtcattatgcctgccgaagtctccgatatcaagcagttcattgagatctgccgccggaaggatgcctcctgtacgttacgctgcatcgatagacctccgagatgaggcctggggatgatcatcggtgctgactgtttacgcctctagccgcccgcatcaagaagaacggcaagaaccagcaaaccaagttcaaggtccgctgccaccgcaacctttacacccttgtcttgaaggactccgaaaaggccgacaagctcaagcagagtctgccccctggtacgtttcaatcgcattgttcctccgtctgagttattgaggtatcagaggatatacacttggaagacggctcttggatatagctctgaacctatgctgacgattttcctctgaacagccctcaaggtcgtcgatgtctccaagggcaccaagaagaccaactaaattcggtaaccatggaatgaacggagaatcggagtgcggcgtgattggttgttgatgcatgcaagaccaactgttggggggatacatgacacggccgtggtccctctgcgagccgacacggggaaaattccgtggcgtggaacatgaatcttacgtcgcaggagtttctttgcgcctttgaaaccggctgctgttattcaccggccaggcgactcgtattttctggacgcactcgaggaacacttttgtcggaggttctagtccctacaacccaatgaaaaaaaaacagttgaaatatcattactacatgggtttctcgttctcaatcgagatttcctaatccattattctcgtcatggatattctctcatctcggatcttgtctcccaaggcaacaagtagaccgtatggaatagatcggctgtccttgaaatttccagttattgactctacttcagtcgtgatctcgagttaaacaatctcagattgacattgtgaccacaattctttctttgctttgatggctcgactgagagcaatgacaatgcctatttttagggtgttgatactccgcacagccattggatctaaccatcgcgcctgcctgaattcagtacggcctaagaacactgccaaagtatctgccacaatggagtctgctactatagattctaccaggttcctataggatttaagtacttggaaatggggcagttgataaagcaggtaatgaggcagtttacgatgaagcaagatatgataggagagacttatttttgttcggggtttacatacaaattgtaggtacccgttgctgtctaccgcagaagcaggtgggcacctagcctaattaggaaggcggtactgaagtcgggatcaataccctatttttatccggcgttgggttctttgatatcggcctttctgggtctttgttcgagtctaattcatacctttgctagcacaataccgttgttgaggatcattatctctcagaacaggcgtctcgaaaggcctttgtggatttttttcttctaaaagtcaaagcaaggatggatgcccgaagcatgcctcggatctatataaatcatctcgagctcgtcaaaaatgaagctatcaacagcattagcatcgcatttttccgtgcctatatatcatatcttctccagaatcttattcgagttttaacacggctggcctcattcagacaacccagcgaaggtggaatcgaaaatatgtgccacaaaaagccactgatccctgctatgggaaaccttagcatgttcccagcagagattatcttcaatattctagatgaacttttggcgagctctcccagattgacacacgaaaacttccatgccattaaccagctgacgaaaacaaataggacactagaacaatacatcaaactcggatggatgggtagcaatgcgtcgaacagtttcaagcaaggcgtgaatactgtccagtggtactcaaacagcgataatgcaaataaggctttaaccctccagggcgtagaccctcaacgcatcatgcccatcgaaggtccccgcggccttggtcccgatctcatcaccggtatcattttggctgactgcacagattgttttgagtggttctccgaggttctgcctgctacccatatgagctgttgcaacgagggcggctggtcatttctttctctggcactgtacgctagagccgagaagctacttgatcttttcttcctctcgggctttcctttcgaaccgagggattttattatcggcagtgctaatgctatggggaaaggtccgtcaatccttgggcttgctgcctcatctagagatcatcagtctttctctaggctctttaggaaactgaaggaagtcttgaacgggcacggcttccagaggactcttagagatagactcacgggtaaggagcgagcggctattcgaagtgttgctcctcagtatttacagaagatgttgtatgaagctggcctggtcactatgcacccggctcttcgttatagtccatactactccggtaagcgcaccctgatgtactaatcttctcgttatatagggttgtatctccttcattacgcttaggacaacgttactgacattcgcataacatttctctacctatctctcagtgaatatttgttactgtcattgatcttgtcttattttgttaagtcaactactgatactgtcttggcattataccactttttacatttacattttcgggtgttaacatatccagcgtataataatcaatcagaactttagctcgagtatacctcattattgtgcattaccagatatatggaataagtagatatcagcccttttttctatctttagctaactagtacctaggtatttctgtagatcattactcttcaagccacggcactcagcacttcattcctatacatgttgcccttcgcgttgcttggcatgtcgcagaattccttggcatcaatcgggtcatacggtgagtagactgagagtcttaggaatattaggtactccgtacggagtactccgtggcagattctatatttccgtcggctcgcataccgaggctttccattcagaccaataaaataaaaaggctgagctcgatctatgattttccaccaacaggttcccataacaacacttcttagctcacaccaacccgtgccaattgacgtaattgtgcttgatactattccatgatcagaacggacctcctccaggaacatacgcccggctagattaatagatgaccagactaggacgatatctgagagggctatgtatataaaatatagctgttgaggtcaaatatatatatcatacacatacagaaatatccattcatttatttcccagaaagccagagcaaaatgacactttcaaagctatctacgctcctagcctctgcctctcttgttgcaggccacggctatgtctctagcatcgtagctgatggcaagaagtaagtcaatctaagaaacaaagtctccataccaataacaactaaccacattatcagctacactggctacatcgttgacaaatacccctacatggcagacccccctgacagtgtcggctgggcaacaacggcaaccgacctcggttttgaagacggcaccgaataccaagatccgaatataatctgccaccgaaacggagtcaacgcagctttgagcgccaccgtcaccgctggctccagtatcgatctccaatggacgacctggccagactcacatcacggtcctctgataacttacctcgcctcatgcaacggtgactgcagcacagtcgacaagacgacactaaagttcttcaagattgaagaagatggtctcatcgatggtgcaactcctcctggtacatgggctaccgatgatcttattgctgctggaggccagtggactgtgaagatcccccccactcttgctgcgggtaactatgtgatgcgccatgagattatcgctctgcactctgctggccagttgaatggcgctcagaactacccacagtgcttcaatttggaaatcactggcggtggaagtgatgtgccggatggcacgtttggtggggagttgtatatcaatactgatcctgggatcctgttcgatatttattctacgcttacttcgtatattatcccgggaccggctttgtatgcctgactcagggttataattaaacatcaggtggagggtgtttggagggatgtgagtttggatgctcattctatctagtgttattcaaatatcacgaaatgaatgaatgctatgtgataacacaactccaaaccaaccagagtccctataaaacattgataattcgaatctattctgttctctcataaggcaaagcgataaaccctcgcacattcgccccctcaagcgccgcatcaataccacttagactcaaatccatcttgcgcaactcaaactccccaaagaaattcggctcagcagaaaccctctcaaagccaagtccctcaaacaaagccaaacttctcaaattcgtctgtccaatcttgacattgagatactcaaacgataaccccttcgatgaccccagtgtcttaacaccagtccctaacttccgcacagtctcaacatcaacatcaccaccaccaacaaactcatccagaatagcaccctggttctgaataatataccgcataaacatgagtaatgcagcgcgcccaaacccgcatcgctggttgactttctcagcgatcatgagctcgagctcgccgattatccgcggcgggctgttgccctcctcgccgtcgtcgatgcgcagaaataggttgatatcgccgaccatagtagccggcgaataactttcagtttgtagctctgtctggctaggggcatcgtcttcaatgcctgttgtgattgcccgacagacgataaaggttagcttgtcggcgtcttggcgccagctgcgttgcatcgagtattcttcttccagagttaggggctccgaggctgttgcttcttggatttccttggggtctgtgagaaaggtggccgatcatagctaggatcttattgatcttgtttgcttaccgggtctttcatccattcgtggtattggggtacatgccatgatgagtacgggactaaaagagcctttgaggagcagagggctattccgcggaagtcagaattagcttcttctgtttgtattatagtctcaatctgcaaatcttcggggaaagtatatatccaggtatgggcatagagcagcgtaccgatgttggcattgagcagcattgtggtggatgatgagaatataattctttgagtatggataattcagaatgactcaatatgtatgcactcttgcggaaaaactcgttgtctatcaatatctcgatggatataaagcggaggaagttagtgggatggatttctttccaaatgtgggtcttggcgcgtagagcccacccggggtgtatacgacaggcttatataaatgtatcagacgtgtagggtttgagaatgtaattatttcattagtaccattgattggtagctctatcagtttatttttgttcttcctgaccgttgaaaactccaaaccggaccacctcgacctctagcgtttcggtatcaaccagaattaactccccagtttcgctgaatttgggaagtgccaacagccgaacacgggctgtatcagaggaatcagcggcacccgtcatttcagtgtcgccatctaggcggggagggacgccaccttcaatcgtggtagtcttgaactgtggttgattgccagcgaaaaaaatatgaggacaggactcgatgacatatggctcctcggattggtatggatatgaccctaaagggtattgttagcataaatttctctgaaagattcaagtgtccaagcatacaaattgtgtccggcgcagtgggaacaccgcagcgccaacgaagcatagcttccatgattcgcatccgagcattcgaatctgtctccttttctgggctgctatcatcaccctcaatagggatataccgcagaacatcgtcaacattctgaccgctgcatccccatactcgccagccttccacgtcgccgtcccatgggttcgtgacactgtcgaaccagctcacctcaggcttttcatcccctctgacaggaggtgcggaatattctcttgcctgagggaacatagtacgatggatcccctgttgagggagagagaagttcgcaggatctttttcgcccggcatgagtgtgataggaatgctgggcaaaatctccgctagaaagttatcgagttctgtgataggcgcggcattgtatgcagagcagtcatagccatactttcttggctgggcttcctctgcctcagcatcgccgaagcttgtcaccgccacatcttcaattatgttggctccaattgaattacctgcgatgatcaagcgggagattttagatgagcccaaggaaggactgttttcggcgttccccgagaatcccgtgtagcccagaagataatccgtcaatagctccaaagcaagcgtgtcgcttgatgttcctgtgatttccaggccactaacgaaggcgattttgccgtgttcctttccagcaagtggagcattgcccccccatcgttgaagctgcggagccaaatccggaagcttgatatcaataacctcgaaatctccatccgcattttcagtgcccaaagccgcgataattgcacctgtcgccagctgtgtagactgcaggaattttccggtgagccgtaagcggccagactcatcttccatcataatttgggtcaaagaggggtctgaagggtcggtgtaggtgaggcggggagggggcgcagaagtgaagttctatgggttgtcagtggaagaagcagcagcaaggttagaaaacgaacctcttggttgagatcatccaaaatattcggcttcattggcaaatgcatatatacggtgccggccacccaacacagctcgccttgtcggacatcgaggactcggtcgacacgtcgcaccttctctccagcgatctaattcacaagcaggtgttaggaaattccatagccgagagcgcaaaatatttcctaagactgagtgctcttacaatgaggccatcccacgcatccgtcgcgacttgttcgacggcaggtttcaactttgcgagtcgcaaaaagtacatgtcgtcatattgctgctgatagtgtcgtcctgcgccagctggtaggtggaaggtataaccaggaccgtaataggagtgattgcggtaaattggctcttgttcctgttcctcctcgctatcgcagatagttagcgaaagctccccgaaacgtagcagcttggatgcagagtggattaagaggtattacctggggggacacaagaaagtgtaatcctcggcgtccggtaccatattttgcggaatgatgttgaggccttgtgtttcggggatggttgagatgaatcgtgatgcgaagaggtgtgtttgacgcgctcacgcgtctgttagcgcgttcaattacattaccgctttgggaatctagtgggtcgatgtaattttatatgggagtaatcggactgactcctggaatctgctattattcccattaacctgattcatcatactattcttttcgttttctagttttcacaaattccttaggctcaaaaaaacgaagtatgtattttgtacttcgtagcgacagatcacattaagccgacctcgggagttctctgtgctcgatgatacaggaaaagagtgtatacttactgagatgtacgattcacaaagcaccatatattgtacccaggagcacatatggagatcggctaacagatgcctcggtccgtgcatatcttagggcttccccgcatttctattcttcatatttgaacgtggaacatctatacactctccatatctaagaaagcatcgagacaagaccatctcttagatccacctacttctacctctgacaatctaccatagccatctctacaacccaaaaacaatgtctctccaaacaccactatgctctctcctcaagattcaacacccagtgctgctagctggcatggcccgcgcatctggagctccactagcagcagcggtctctaatgccggcggtctgggtacaatcggcggactaggctacacaccagctcaactatcagagatgctcacggagctcaaatcactcctccgggacccctctctccccttcggcgtagatctcgcccttccgcaggtcggaggttcagcgcgtgcaacaaaccacgactacacacacggccagctggacgagctaatcgaggtgaccatctcgcacggcgccaagctcttcgtctctgccgtcggcatcccgcccgcaaagaccatcaagcggctccacgaggccggaatcctgattatgaatatggttggcgcaccgaagcacgcccataaggcgttaaaggcgggggtcgatattgtatgtgcacagggcggcgaggggggcggtcataccggcgaagtgccgttctccgttctcgtacctgctattgtggatgttgctcggcagtataagagtccgctcactgggcaaccggcacttgtcgttgcagccggtggtatcaacgatggccgcagtctggcggcgtcgttgatgtttggtgctgcgggtgtttgggtgggcacgcggtttgtggcctccgaggagagcggcgctagtcgcttgcataaggaggctgttgttggggcgcaatttggcgagactaagcgcacgctggttgtcactggtcggcctttgcgcatgcttcctaatgattatattaaggaatgggaagcgcggcctgctgatattgccgcgctgacttccaagggtgttgtgcccatgatggatgatttggagaacgacaaggacaccgatatgccgtttctcatgggcgacgtctcggctagtgttaacgagattaaaccagccggaatcattgtgaaggaaatggttcagcaggccatcgaggtgctcaaagtcggaggctcatatatcacttccacagggtcatcgagtaagctatagatattaggtaaaagttaggatgcatcatatttgccaagatttttttcttgttatactatgacatgtacttgtacagaaaatatgaaaccaataagacttgaagaaaccaacgaggaagatggattatgccttggtaattaccgaggaatatcgcgagacagacaaaaaatagatggcaaagaacttctacattttcgaactcaacccgaatcttcagatctctgtaaacccaaggcaaacccaagacaaactgaagcatttgccttgggagaaaagtacgaagtccaagaccgaatgttcatggaggtagccaaagtcgcttcgatcaaaatcgacgtcaaataaattggaataatcttagaaaaccaagccattgactcccgcagtgttgccattcgctcgagcttgcaaaagattcgggggcggggtgggaccgaagacaggcttctccgagggttgttcgacccgggttgggggtggctcgagatcttcctcatcactgatatcctcctcgtcatcttcgtagtcatcgtcgtactcgctttcagtgccttcatcatcgccctctaaatgatcatcgccttccgctagagcaagtccttcgcctcgaccctgggcttgcatacgccgacaaagggcttctaggtggtggcacttccgtcgccaccgttcaagttcttcatgatttctggtccgttcctctgccatttccagaatattgcgattagtttgctcgtgcttccgattgagagtatgattctccttctctaggcgcttggttttcttggacatttcttccatctccttgcggaaggtaaggaaaagatcgttgctgttgttcaaagtgtcctcgacctggtggtcttcgtcagcgaccggggagtgagacgggttataggaacccttctgtacctgtttgaatttttccacatagatgttgagttggctgcgcagttcagcctcggtatgggagaaagtggaaacctgagaggtcaaagctcggcttcggttggcttcaacttcaccagcgcggcgctgctcctcaaatttggaagcgagactttgaatctcggagtccttgccacgtaggaggcccctgtaatgcaagtcgcgtgtgtcaaactgctcgctaatggtcttaagcttggcgcggagtctataggttccgattagcaaatgtgaagctcggagaaggagaggaactcaatcgtacgcttcatccaaatcgacatccaccttttcgctacgagggttccctttggcagccatgacgtcttgaatgtcgtaaaggagcgagtcgagacgttcgttcacaatcaagcgcgctttcttctcagtgtcctccagcttcttattctcatcctaccaaatcgtttagctggcaagtcctccgcggtgtttggcgcaatcgtctcgaggcgcatgctgatggacccaccttgacctttttgttctccttggtaagttctcgacacagcttctctagcttgtccttcattgtaacggtcttgttgagatcagacttgcccttatcctggtccttttgcaactgatcggcgcgcttcttgctcttagaataatcacgatccaacttcttcatatccgccaacagctcggtgtacttcttatggacggtttcgagtttggtcataggggattcgatattgctcaaaagctggttgagatcacgggttgctttcttgacctcgcgctctgtatatcaaaatccaagtcagtgacccttgttccagactaaccccgcagtccagcggtaccaagcaaagaagaaaaatgccgccgcagaatacaaagggagtcacgcaccaatttccgcctcttggtctttctcgccggcggcatcttgctccagctgggagatcttggcggctaaaagcttggacgtctcgtttggatcggccgctttcttcaccttgttcttctttgccatggaggtggacgacatttcaaggtatttgcgtgagtagtgcaaaaacagcgtatttggcgattcgattcacgagggggttggtacgaaggccggaagccgaaaatttgcgccgaataggcgggatacagggcaggatgtagacggatcaatcacacggaggagagatcccggaggcaaggctcacgagcgggatcactggccctaggatgtaaggatcgtttgcttgtcgtatcgttcgggaaagagcaaatgttggtcttcggagcagaacttcgacaagcgggcggccagagtgaggcttacgctagcatagatgatgtaagcctgggcggtggaacctccagggctggacattttcgactccggggttgttcttaacgatcgtcaactacccataattatgttgcgctcatcgatgcgcctcggtacagctcgagtgcccaagtctaatccgcttattagtcgttcattgaagtcaacgcaaacggtccttccacgcaatacccggagagccgcatcgacggtgaccaacttggataactttcccaaggtcggcgagaagctccacggattcactctacaggagaaaaaacatgttcccgagcttcatctgactgcagtctggctgaagcatgaccggaccgatgcggactacatgcatgtcgccagagatgataagaacaatgtgtttggaattgggttcaagacaaacccgccggatgctactggtgtgcctcatattctggagcatactacattatgtggcagtgaaaagtgaatcatatcatattcaatacctatatttttgctgaccttatgctccttcaagatttccaatccgtgacccgttctttaagatgcttccgcgctccctatcgaatttcatgaatgctttcacagcctccgaccacactacatacccctttgctacaaccaaccaacaagatttccaaaatcttctttctgtttatcttgatgctactctacaccctcttctcaaggaatcggatttccgacaagaaggatggcgcttgggccccgaggatccgcgtgctggagagtcgattcccgggcaagctgaaaaacagctatcattggaggacatcgtatttaagggtgttgtctacaacgagatgaagggccagatctctgatgcaaactatctctactatattcgtttcaaagagagtatctttccctcgctaaacaactcgggtggagacccagagtatatcacagatctcactcataagcagctgacggagttttccaaacgcaactatcaccctagcaactccaagatccttacatatggtgatatgcctctggctgatcacctgcagcagatcggtacagtcctggatggctttcagaaagggcacgcggatactgatatcaagcttcctctggatctcaccaagggacctcttaatgtgactgttccgggccccatcgatacgttcgccagcgaagacaagcagcacaagacatccacatcctggtacatgggtgacacaaccgatattgtggaaactttctctgtaggaatcgtttcctcgcttctcctcgatggctacggctcacccatgtaccgagcccttgttgagagtggtctgggctcttctttcacaccaaacacaggtcttgacccatctggtcggattcctatcttctcggttggacttaacggggtgactgaagcggaagccccgaatatcaaaaacgtgattcaaaacgtcttccgggaatccgtttctgctgggttcagcgaggagaaaattcgtggattccttcaccagctggagctttcgctgcgccacaagactgcaaactttggaattggtgtgatggagaagaccatttcgtcttggctcaacggctcaaaccccatgaaagagcttgcttggaatgatgtcatcgacgagttcaagagaagatatgctaaacctggttatctcgagtctttggtagagaaatacctcataaacgaccaatgcatgacctttaccatggtcggtactcccactttcaacaaagagttggacgagaaggaggtggtgcgaaaggacaagaaacttgcccagcttattgaagagcatggatcagttgagaaggctgtcaccaagcttggagaggaggaattggaacttctcaagatccaagaggacgcccataatgctgacctgagctgtctcccatcgttgagagtcaaggacatctcgcgagagaaggaacgcaaacctgtccgagagtcgaaagtcgagggcgctgacgtcgtctggcgtgaagctcccaccaatggcttaacctacttccaggccttgaatgacttcgttgatttgcccgatgaactccgattgcttatgcccctctttaacgactgcgttatgcgtctgggaactgccaatcggtcgatggaacagtgggaagatttgatcaaactgaaaaccggagggatctcaacatcgtcattccttgtgtcgtccccaacgcacttggatcatttcaaggagggtttgcagttctctggattcgctattgacaaaaacattcccgagatgctggaaatactctcggttttggtcacagagacggacttcacaagccctgctgcgcctgcgatgattcaagaacttctacggatgacgactaatggagctttggatgccattgcaggaactggtcaccggtttgctgtcaatgctgcggctgccagtctttctcggagcttctggatccaagagcagcagtctggccttgagcagctacaggctacggctaacctgctccgtgacgcagagtcctctcccgagcgtctccaggagctaatcgagaagcttcgccttatccaatcctttgccatctcttcgtccaaccttcgcgtccgcgtggtgtgtgaaaaggagagtgctggcaacaacgaattgattttgcaaaagtggatttccggactgcctcggacacagtccccaagcgccaatcttaccacgtcttccttcaagtcagccgacaaggctttctacgagatgccgtacaaggtctattattctggccaggctcgccaaactgtgccattcgttgacccatccagcgctcctctcagcatcttgtctcagcttctcacccacaactacctccaccccgagatccgtgagaagggaggtgcatacggagccggtgctagcaacggacccatcaagggtatcttcaccttcatgagttaccgagacccgaatcctctgaattcgctcaaggtcttcaaaaacagtggtatattcgctagagatcgtgcttggtctgagcgtgagattgaagaagctaagcttggcatcttccaaggacttgatgctcctatgagcgttgatgacgaaggggcccgctacttcatgagcggcgttacccatgaaatggaccagcgctggagagaacaggtcttggatgttacagccaaggatgtcaacgcggtcgctgagaagttcctggtgaatggctcacggcaagcgacttgtgttctgggtgagaagaaagactgggctgattcggaatgggagctgcgcaagctttccatggatgccgccgcataagcgatatcacccaaggatcgccattcagcagttgcctctttgtttttgcacaccttctccgaactggacatgatccttgtttagggaatttgtatcaccacctcacttccctgtgtatttctatatacttcactttcctccatcacaccctacttcacaccctaccttgtacatatatcgtgtatatcccatttgtatacatctctattcttctgtttcctccctgttttcatgtcttcccctgccttgacccccaacagcgctgaagatattcacgtgcttcggcaccgagctaatcacatctacaaccagtcactacctttggttgcaagatgtcgcattcatttccatcaggatgctcgcgcaagaacaaagggaatgtgaaccgccaggtacacttctcttctccgtttttcagacccgtcctggatttataagtctacacaggacggactaaaaacgagggaacataaatatcgtcatagaattcatagaattcgtaaacttcgtagaaatatcaaagtaaacaaatcttggaatctttcaatgtctttgactaaaagaatgaggaatgataattggtctctgctaaaaagcggagaaatggtgattccccaccgctgataagccccgatataactgtttctctttacttcttctccggttttttgatcagttatcaccgcgagtaatggagagtgactctgagtagccatgaagagatcgggcgccatggtcggcccgaagccgaccaaggcctgtggtgagtccgagacggcattggtattgtagagaaaagctaaccagtcaaagtaaattgccgacgactaaaggtatagacagactactttccaacatactagcaaaaagaccactcacatgaatcagatgaaatgcgaagtatccggacctcctccatgtcgccgttgccgtcacactcgaacagcctgtgtctttaagccccgggccaatgtgagcaaaggatcacggaaacaataacccagaaacaaagctaacacctcgtcgaggcatctgcaatgcatgaattaatggagatgcagcaagatcaagcttttgcttctctgtcagtgatcccggatcatcagtcgattttgaaccggctggccaggatcgaggccgcgctaggtatcactgaggaaccccaggaccccgaagaccaacttagtatgtctcgtggggcaagtctcgaagaagacacggaagtcgtgccactacaaggtgtatggacagcgcttgcgcatttacgactcattactcgtccgtctccagatgatagtatctggtcgcgatccgttgttcagcagctatggagctcgtaagcactatttaaatcaagatgtgacggccgatatctaacaatatcacagtttcttgaaaagtctcccacttctgcacttcctaacagatcatagcgcgttcgcttcccctacccctgtcctgctcgcttctgtgctttacatatctgctctacaccatccgtctgctaggctggcatctttgaactcggaatattgttccgctatgtatagtgctatcgctgagcttgtgacaccgtgtctgcgtggaagtgacctgcaggtatcagaacacaaggacgaagaacaaaagctctccccacaatccaaaagagagaaagcatttcacgatatccttgggttaataatggctagtctgagctgcgaggcttatgttggtgccacaggatcgtggattgcaatggcatatcgtatctggcttgatcattgcccagcagagatgaattccaccacgaaagactggcgtggcttgttctccggtcttcaggtaggagcaggtaacaaatcccgagattcggatactttatttacgtttgttggcttcaggtcattgatatcgaacacgcctcaatgcacatgtcctatccactcctcccacgacatgctgcaaatccaaatatacagcggctagatagccatgaaggaaatgccttccaggaccttgcagaaatgatgcactttggactgagtcattttgtcggccgtgggctaccgagcatatggtcctctctcaatgcagatgaggttgacatcgtgcctatagctcggtccccgtttactgaaaatgactcgcaggtcatccggcactgggcacggaaacttgatgactggctggtacgatataataactcatcccgtaagtatccatgagccagaatacaatctccggggctgactgttggtagagcccactccgtctgatcggcaaggtattctcattctgctccagtatcacctgcacaaactatacgtgctttcgatctatcatcctgctcgtggatttgatctcagtcctgcgaatattagttcttttgagcgacacgagttgctcgtttcggctcgggcagtgttgaggctgagacaagatgatgcgagcatatggtctaactgggacttggttgtaagttctgatccagagcctataattctatttttaacaacatagatgatcacatgggcggccgtattacttctccagggtgttgaagacggcatgactcacccagatggtatggcatttcgaaaaacagaattatcgacctcttctaatgttcgttctagatttacacctcatccaagcacatctccaaagtctagaacgaaggaatcagtccgctgcaagcattcatacctttctctcccaccgacttgaatctagtatgcaagctatgcataccccgccagacacaagcgtggcattatcattccctctcccaagcgcagatgactcatggactatatttgaccaagagataatgtctcttgcaaacccaccgtggttattcgatgaatcaacgcagctgccgcagatccaaaaggcttccacaatgcaccaattacagtctgggatccaacctttccagtacgactctgccatttcagcatctgcatcccaacactttgcaccagatacacagtagggttgcacagcggcgaggtgcgggtgttcagccgatcctcggtgtagtataatcaaccccgaaaaggatctagtggtgcacgaagaagcactgattgatgtaatctagaaacatgctatatacaattcaaatcacaaatgatgaaggaactcctacagccttcgaacactaaatctcagcttgaaagtgtccatcccctcatggtagtctttcatcatcttatctgccccagcccatttctccatcctagtctcaacctcccatctcgtccccgtttcagtacccacctgctcccagaacttcttccacgtagaaggatcatgacgatagtgctccccagaggcctccttatcttctggaggtggggggttcactaaaccaatctgtcgcccgattagaagggagccgggtttatcctggagtaacccaacgagccgctttgcgactagaatctgctggtcccaattgaaaagatggaagaaggaagcggcgttcacaatatcgattttgtgggtcagttgcttgactaggtcggaattgtcgtcgaatatgtctgctacaatgaactgggctttgaggtgatcgcggtcgttgaaaagctcatatccaatgtcgtagaagtcttggcgcaagtctgaagcatatagattttcagaagcgaccccgtcgaagacctgatttggtacgttaagttgcattcattgctctagaccctgcatgagctgtctggggtcttaccagttgacgcagctcttgcccgactgcacatccgacatcgagcagcttctggccagacttgagtctatccaggatttcagggtagagcggtgactgtgggatgctcaagtctaggaaccggaatgatccaatacatgggtacggaaactggggataattatcagtatcttcggccaacgagggaatcgtgaagacaattgcgtctgatgaaaaccacacaggccacgcttgtaggacatattgtcgggaagaaatatctaacttaccacagcgaatgctcgatctctctgattcattcgtcattagcgtgggcactctcgccatggaatgaaaaggactcaccacttttttcacatgttcaacctcgtgtcctggtgggattttgctgtacttctcgagcagagactttgctggctcaggaacctcaatcagttctggctcgtaccaggcgaacttatgaggatcaaagccgccatcgagtatggatctgagatcggactcggctttggccatcctggatgagccgaagttcgtctgtggtgcgaagcctgtggtgcaattgagcaatcctgtgcgatttggatatcgcagagcttggctgtgtacttcagtctcgtacctggatagaccggaagagcaattctgttgaggatgccccgcgtggggtgtggggacggccccacggtttggttctaatcgagaatgaagttcatctcaatggaaggtgaagctcatgaagaggactctaattaaagatccgaattcaacattcaaggacgatagcgaagcgacaaaagcaattggatgttgggaactgtgcaggagaaaattggcaagatttgaggaagatctatgagcctagagggggaatctcaaaatcaatcaggtttatcatttgcaatttaaaacgctcgagaactcctggcactctcgagactcttgaattcataggggtatagtaacaaaatcgctcagaatatcatacaaattaggtgatcaatggcaaaggtccacaataatcacccaaagcaaattacagcaatgcgtgtgaagactcgttaacacgatcaatcgagagaagtcgtatttccaccaagctcatgtggagatatagcccttggtgaggatttcgataatcccggagaatccatggccaaagatgaaggcgacatggataggcgtgggaatggctcgagttggttgtcggacaaccggcggcttgatgactcgctgaaggtctttttggaggtattaggttgctcttgtggtcggagacttggactagcggatattgcggcaggctaaaatgtaatctggttaatttcttcttcatttataccggaagatgaaaatctcatactttatcgctgcctcccggatcaaggcctcgactcaaagccagctcgtgtgcagcgagtcgtcttcgcgcaatatccgattcttcttccaatgccgcgcgctgctcttctgtcttcaggtctgccatcgatggtgtaccaacactttgagcaatcgcggcatcattgtaactagtcgaccgctttggggaccgtttcttcttccgctttgtctttctcgaggacgcaccacctagactagacgcggatgcagactgtacaatttcagacttcgccccggactgatcatctgattctaagcccgttccccggcgcgcaaaagcgagcgcaaactcatcatcgaggggcactgcatcttcctcctcgtcactagggaatagatccccgcgggaactaagtgagttgtccgttccgcgagaagattgcgtggtactgcgattcctcctattatggatgggggacaattgatcctcctcatcatcgtcatccatagcctccattagtggctcgtcttcgtgcatatagcgccgggcgccggggtgttcttgcagatctgcagctgaaggacgatacttgactcccctcgcaccgaatctccacggaaagcgctcgaggaagccgaggaatgaagagcttggaatcacagtcgggtcagcgcgattgtccggaatgtgcgcggtgctccttcgcctagtgttttgtgtcccgtagctcatcctcctaggccggcgcggctggtcagcagttccgtgcgccagcccgctgccagcaaggaggcggtcgagttcaccagtaccccatccaattaagccatcatcttcttcttcgttggcccagtcgtcgtaaaagtcaaagttggcttcggtttggccgcgtcgtcgccgccttaggtggtcttcacggctcggaaggcaaggtgctgtacatgcagtcacgcaatttccaatggattcaaaacacggggatatgtagttgtgggagaaagtataaagcccctcttgcgcggtttcgttggcggtctcaaggttatgggagatctgattaatccgttgtcggatgcggggatcgcgcggtcgcatcatattgggcaacgacgtgaagaatagagactactaatgacggatcttgtgtgattcgctccaccagctgtcgccggcgacattggaaaaatgtacggggagtaagcagaggtaagtgaggccgcagcatgaacccgacgatgtcattccttgctgagtcagcgcggataattttggcggaaatttgggtttgatgaagatacgattaggacggagaggcattgagggaggaaagcattgtattctatatctccaagatggtctactatgttagattcctgaaaacccccagaatccaacaacagaaaggggccatctacatctccgctcttatctgcatcaccactgatctaggggactcttttcttgctgaagatgttgatttgatggtgatagctgagaattcctctcgagttatatttcagaaaacgacaaaatggaatgccagtaatcgagaacttgctattaccctgggtcctctcccatccaatctggcccagcagtctatggtgttgacggttaaaatgccggactcaccagaatatgtcataccccagtattcccccatacaattagtggttgctgcaacaagtgctccatttgggcctcattccacaccagcagagaagctggttcaacgccgccttcaatacagcggctgtgaaccattccccatggaaatatgggaagagacaggaaatagcattgctcgacacatatggtaagtcactctgctacttccctttggctttttccctcgagattctaaatacaaattcctagggatgcgggcctagcaacagttacataccttcacctgatgtgtgaggatataaggaagacggcccgtaacaagaacaaaggccctgaacctaaaatacaagctttgaagcaggtcctatccgtctgcaaccgacctatccaggtagttgagcttggggcaggatgtgggatagcgggaattgcattggcatcaatgctcccgaattgttcggtattactcacagatctccctgaggttgaggagataataacacgcaatatgaatgttgcccaactcgcaaccatgtccagtcttcactatcaaaatctcgactgggacgacccaccggatgagctctgcccacggcctattgacctcattcttgtctctgattgtacctacaattcagatagcttgcccgcgctagtctctacgcttgaccgattggttcggacctccccagaggcaatcgtcttggtggctctgaagagacgacatgacagcgaaacggtgtttttcgacttgatgcgctcggcgagatttacggcggtgcaggacagcgttgaaatcccttcgcagcacgatgaggtggatgaaattgagttttactgctacagtcgattaatttagcatgagaatgaccccctgggtggaaagaaaatatacccccaatcaataaaaggacgacgtcgaagcataggtaacaagaagcgagaggatacaacggccctgtatgaaggatctcgtagatgctccaatcacgacaatgcggttttttttcccggaaaatagttctgtaatttataccactatggcgtacaatctacatctgactattgaagatgtctactatcaaacgcagaatacatgctgggatcgcactgacactaatcaggtggagatgagattaagcatcgaggctacgaaacaatttatacaagtgtaacaagaataacatagacgggcatctcacggcatacctcgtttatccttggtttttacattgctaaggtatcttctctggcatctcggtgttttgcttctcggactataaaaggaatcatctagtaagagagggtggatcgttccccaatttaacgatggtcccgaggaccacttacaaaccagcagaattcaaaggtggatatagctatattcataccagaatgaagtcaccgaagaactggaggctaaataagatgatctacgttttgctgactggatgccttgagtcctcggaactcttcgcggtgtacaatttcgggtttggataaagtctatcaagcctctaggtggccgggatcaatacagcaagactattagtgctagcattgggctaaatatgtatgctgcattttctaaatgaccagtcctatctataacataagctgttgatattcttgtggtccgtgcacaaagtggacagctgagtggaatcgagtgggatcaaatgtgcgtcattatgggttctcgcccaaggcctattacccaagagcttgacctcaagcagttctgggcatatgtactgtaactcggcatggtgcatagaactacctgcaagtatatcacatagctctatatggagtacggagtactccgtaggtgcataactaacaatttaaacatcccggtaggacagtacgaacagtactgccacgtatgtacctgaatgtacgaaagtacctgggatctactcccgaggtctgctcggagggcaaatcacagatacacacacacaccgctgccattgaatccagcaattccgagagcatgggatttagctcctgcatcatgcagtcgcacctaggaagagaaagacctatcgcagagccggcgagatggtaataatggatgcctaaacaaggcccaaattaatcgcgcaggcttgtccgaaagagtaatagaggggaagctcgtgaagacggaggagctgaaaagccctggaaaagccctggggagctgaagaaaccctttttccggctgagtcagcaccgctcttttttcctcgaggtagacgaagggcttcgtcatcttttcagggcttctttcaactctccctttttctatttgggtcctacagctcctcattttacaaggtgagtctttttattttcaggttaacttgattgggatccccgtgtgtgactccgtgccgcgttttatttcctcgtgtgccctaagctcgctcactgcccccccaagaaaaatttctcaaaatcaaaaaccctcgatttccccccccccttcctctcactcatactctccccccctcttatagttctcatagcagctggactatatcaggcttgctaaccacgtctctgcccttagatttattcggtcctctaggtcctcttttcagaccctgcctttggaatccccaaaggcgattcggtcaccacggctccagtagcctatcttctggttcttagccaaattgtctccacccaacgtctccgcgacactcttaacaacattccacctcctggtcttttctgaactctcgtccggttcgcctattttcgtcccgttgacgtccccggagattatccccccgttctctgagctgccgcataggacttctttcaaggttcttcctcttcagggggaagggtctaggaggcttggtccagtcaactacggttgtgacacttttcgtcctccctaacgcgcagtcgcctgccgattaaaaactttctatcatctctctatttctattcaaattgtgctgagtcgcagcggcatggttatggcaccgactgcgtgtgtatcgactgctgaagtatgcaccttcagaaaagactataccaatagtctggaccatctcggtcttgtcagcagtcatggcggggacaacaatttgttgcaatcatcgttgactgccaaggagcttgttctggatgtgttgaggaagcgtgcggcggaggtggatttggaccaatgtggtcctggtgaggaggatcctttttacgttgcggatatgggtgaagtctaccgccagcatatgcgctggaagatgaatttgggccgtgtcaagcccttctatggtaggcctcactctttattcgacagcccaccatggacccctgctaatgaacactgaacagctgtcaagtgtaacccggacccagaagtcctccggctcatggcccagcttggaaacggtttcgactgtgcctccaagtctgagatcgatatggcccttcagacgggcattgatcccagccgcattatctatgcgcaaccttgcaagaccaagtcttacctgcgctatgctgccgaggtcggcgtcaagcagatgacctttgacaatgccgatgagttgtacaagatcaaggccaccttccctgaggcggagctctacctccgcatcttgaccgatgactcgaccagcctgtgccggctgagcatgaagttcggtgcttccatggaccaggctcgtccgttgctcgaactggcttataaattggacctcaaggtcgtcggtgtcagtttccacgtcggatctggcgccgaggatccccgggctttcctcgaggccgtgcaggatgcgcgcacagtctttgatcatgcggaagagatcggccacgagctccacactctggatgttggcggcggcttctgccaggacacatttgagaagttcgcgggcattctgggcgaagccgtggacacttatttcccgccaaacatccgtgtgattgccgagcccggtcgctactacgtagccactgcctacactctggccgccaatgtcattgcgcggcgtgacattccgcatcccgatgatccctcgcgcgatgctttcatgttgtatctgaacgacggcgtctatggcaacttttcgaacatcatcttcgatcaccagcatcccgtcgctcagattctcacctgtgcctcggacggctcccagcctgcttccccgaactctgcgacttcggaggacatcacttattctatctggggccctacctgcgatggcatcgatgttataagtgaaagcattgccttgcctggcctgctggacactggcgactggctctattttgaggagatgggagcctacaccaagtgcagcgctacccgttttaacggcttctcggacaaccacgaggtgatctatatttctagtgagcctggtgcttccgctttgctcaactactagtttgaatactgttttgcttcacaatcgtttacaattgtctttttgttggaatcgctttttgtttattgacctctacccggaggaggccgtctaatatagtatctatcgtgcgttctcgctgcatatacgatcgtattttttgccattagattctaaattagaatagagcttgtcgtgtttgcatcaacgtccattgactaggtatcttttggtatcttttctgctggacgttttgctatattgttatcgtcaatgctttcgaacataagatatgaaaagtcttgatatttatttacaggtgtatcatgttctctatcatcacatctacaaggtatcatgagaaactagtccgtaccaacatcacggcatctatgaacaagagctggcctcatcaaaaatctagaccaaacgctccacactcaactccacaccctcttcctcgcctgcctgaatcagcccaccagcttcgagcttcttcttccacttagccgactcgtatcgagcaagaatcaatgtaatgcgggcaatgacagccgggtctgcagactcggcaaccacagcggaaggagtgcaggtccaacgtccaaacgcccaattgagaatataatactgcatgccaggcgactcgagcgtctgtctcgcattcaaatcatccgatgtctccaccggaagatcctggttcgagcagcgaacaatccccttgatgcgatacacctcctcgcgaggcgtcaaagagagaaaccgctcgagagcagcaacatccaccgtcttcccctggacatcggacttcaaaaccacagacagaacctccacctcggactgatgatcatgttgatgcttactctcatgtccattgccagcctcttcctcaaacaaagccccatcaatacccagcatcacttccatatcaacccgacccttatccgacttaacccaaggtgtctcaatctccaaatcaccaactcggtccagacaaacatcaaaccgctcaggcatatcctcccacttattaaaaacaatcaaatcggtatacttggcctggatctttgccgtgtacgaggtatcctcatatccctcccagttctcgacatctataacactaatcacaccatcgagaacgtaatgtccaccatgctcgcgcgcaagcctgttcacctccatcgcaagcgttgcggggaacgcgctgccgctggtctcgatcacgatgcggtcgggtttcacttcggcgcggagctggtccagtgcgtcgctgacttggccaacgaggttgcagcatatacagccattgagcatttcgcgcacgccgctgatggattgcgttgaggccagttgggagtccacggctacgtcgccgaattcgtttttgaggagggccagcttgtaggtctttggaagttgcgggattaggttgaggaggatggttgttttgcctgagccgaggaagcccgtcacgatggttatggggattggcgccattttggggttgcttggcgacttttgttgagtctgtggttgttgctttctgatgttggcggcgggaggctatcgccgatggaggggcactagccctagtttaggagccctaattacctccttgggattgttgaagaaatataaagcgtatcttccttttaataagaataaagtcaaataacatctctaccagtatcttggaagctcgtagttgttcataggatatacctcgaaatgcgagagttgagattgagtagttgacaagaaaccttccagagtaggtatattttatatagttacatcgcaaggtatgaccaaataggctgtacagtaattcagacctagatgagcatgactgtgcacagactatccgagaaatagcagttacccaaatccagcccataaaccacgatatcgcacgaagtatcaatgtctcgagacggatctattcttcgaacccgttgttcccgtggtcggtctatcgctagccctatcccacgatcgatactcagatcgctcacggcgagagtgacgtgctggtgcaccacggttggtaaccaccgagtggtctgtgtgattgacggactcttggttgtgttcttgatcggattcggcatcgctggaccgattcatacttccggatcgggggcgcattgtgtatgatagagtttgagaagaagagggctcaagttgattattgtgaagtcgaacggtgatggtcctcttttatacaaagtggcggcggtggcacacttgacccaaacattgacatttacttcattgtgaacgcattttgatgcaattgacagagggtccactggaggaattcttttattaacctatttaacgatcgctgcttgggttcatggattgttgaatcctagccggtctgatatattcatgtactttctacctacttaagtagcatagccagaaaccgacaataaagaaagaatgcgaaccaaatagacattcaaattccgagtttgcctaaggacaaagagattcaggatcatgtcatatatccttaaatctcaaggttattttatagtcccagtcccttggtacctccagtcgtatttggttagctgcataccttaaattccaccgaggttccactatgcctcgacattgccccttcgcatacattgcatttcatgacaatagtttttatctacatgactctagaattcacccgcctttgcgaattgtgaataggatattgtctgctgtgaatccattaccatattacttagcagtggaactacttaacctcgtggaaacgcgaccgcagcaattattcggcccgtagatgaacaacccggacgtcaaagcccttcttaccgcaaataccaataatcctttgacccggggactttcaggttgccgtggttcgagtgtacgcgtcctcagggtgagatcgagtgtttctggttgacttcctgggtttggatgtgcgcactcgacagaggatttagagcagctgtctatagcctgagcagtatcaatttggatcgagtctcagcattgccactcaaatagtctcagtctctgcgacatccttattatacatgtgaagtaatcagcgagaatcctgcccccctagagaggagatgcgatcggtgacattcggaatattcaacaagcggcaaaagacacgaattattcagatccccagtcaatggagaataaaatcccaaaacgccaaaaatgtatgatctatctactttgttggctgtgtgtgcttattgctcatatgtctctctcgtaggaaatcgcaaacctgttcgttgctcattttatcaacgcattcgcgttcctcctgggaaggttctaaaatataacactgtcatcagcaatcaagtcatacgtgctgccaggaaactcatgcatgaacatacctggaggtaccatctcctgagcttcatttgatccacctgaaatggcgcgaatgtgaccttgaacggtacgtaaggctccctgcgcagcaggatacgcttcgtccattaaagtatccttcgcggcgatcatcttctcttgggcggcagagctaacggaatttccaaactccgacatggagccaccaggagccatcgagtcgagttgatgtttcatgcccgtaagaacaccttcctgtccttcctgtccttcggctttatggaaagcggcgtcatttgcctccatctcgacctcggattgcctccgttgtccgagtgcaacattggaatccaggtacaatgagtcgctggaggggtttggactcatggtgaagcagtttgctcccttggattgggagtatttttcggattctgggaatgacatgggcgcggagaataacgaagtggaattagaagcaaaaatggtaatggtaaggcgtagggctgagtctgacgtagggctgatatcgggatctgttcgggtctagtatcggagtgggcagggtacaacaatagcgagtagggctattgaccaggattctgcagcaggaatctcttttgggtaattgagtgattgagtgattgacattgtttcgctggacttttccccccgaaagatgttgctgatcgttcctagaaatgacgtcactggaatccacctgcagatgcgttcatcggcaaaggagattcggcgtactctgctctatttttggatactacactattcattcacttccaagtcggaccgaggttctttatcacttgaatttgaactacagttgctctttgctattttcataccgggaaattcaatcatttaatgcaaaatgcacatcatataccgacccgattagttgtagatcgccgcctggaggccaggaatgatctcgagatccttcggcttataggtgtatttcccctcactagaaatcttgacatcccgattctttcgctgctgctgtgtctgtcgaactttaacccactgctcagtcgtcaggtgctgtccaagttcggtgaacgcgttggtagtcaagccaagtctctggaggagggggctgttctgaattgggtcaaggataacgtggttgttggggctatattcattagaccctgaagactccggtgccgcatagccgaaggaacttaccgagcaaaatacaacacacccaatcgatcaatatgagcctggtcagcagggggtgcgtggacccggtgaatactcgacttaatcaagccacccgtgagcgcggtgagggcgtcgcatgtgttgatagtaatggtcccgtcctggggcttgacccacttccattgaccctctgagttcaggatctgaagtgcagctaccggttgtcggaacagaagagtaactgttcccaagtctgtgtggccgggactgtagagctcaccgaccttcttgttatcctcagcgctgcgggctgcataatgcatatagcgcagatgatcctcgcccttgaggtcgtattggtggtcgcggactagttggtcttcgtctggcagctcgagcaggattgcgaagaggcggagaagcttctcaacaacttcggtgtggcatttctttagttcgggtcagttaaaggaatagacgacgatgataaaaggaaaattacccgactgaaagtttcaatctccttaatgttttcggcaatgacagagggctggggacgctcgtggtaaccgtcgaactttggaatattgtatacctggacattatccttgatgccatttcctaagctgagttacgtgttagcgtttctccaatatgtctctgagggcgatctgtttcttacattcggtgccctgcaggacggtaagagttatattcacctctttcaagatcactggcgctgtggaacttgagtttctcttcaagtggcagggcatagaactcccgccctagagcgaactggttgtcgatctcttcttggctaatgttaaagttcttaacgtaaaagaatcctgtttcaagtctgattagcactaagccaaggatcgagcctactcgaattcatatccccggcctcagcacggagcacaaagaagcgtcgactcaccaacatttctaacagcgtgatcgagctgcttgacaagatcttcctttcctccaggttggtcatactgggtaaggtccagtgtgataagctcagcccagtcaactaatcccggagcagtcagcaagacgaaaacaccaagaaatcagcattacccacggtcttccttggtcacagggacctgatcatatttttcaatgtatttgcccggcattttgggcaggctatgagtttccaagaggcgaacaagtatatgcagctacttcaagtagctcgtttccacatcaacaccttaggaaacacacgtcgtatataagtctattcgcacatcattccgacgatatacccccgcatcagatagcggagggattttataagagcacgcaataaattcgtccgatgaggcctgagataacggccaatttccggatttcgtgtggtagaccgggattcgcgcacgccatcatgcagaaacatgtcgtctccgccggcgcatcaaagtgaacggcaaatgtgttagcttcggttccagacgtcctttagcctcgtggatggtctgttttgactattaaaaattcctgaacgagcgatggtgacagcgagtggggaaattggttaacatctctacggctagctggtttttatatgccgagatgctatatcaagagatcctataagtaatggcggtggtctataatttaatgtgctttgtcttttgcacctttaggaacagcatcggacgtctgccgagccttccatgtctgacctgaaacccaaggccgggagattgtcccctctgggacttttcaaggaagtatttaattggtacccatcttcatatcctgccgaggagagaaagtaagcagatcaaggtttgggagagtatctctgtcgatctatactgacgttgccagattattattcaagttggacttgtccattctgatatttgcttgtctctgctgtaagtacacaagtccaaatgatgcacccgagagacgccactaacgaactcagtctttgtcaaatatctgggtaagcctatttccacattcaatgccctttgactcgatgccaatatatcgcagaccagacaaacattagcaatgcatatgttagtggtttgaaagaggacttcggtctgtacggcaatgagctcaactacttcaatgtctgctacttttgttcatatgtgctattccagattcctggactactgctcatgtcacgcccaaagttgtgagtatcaggaattgatctctttctcacccataccaagcgactgactcattctatagggctcgctggttgttacctacactcgaagttctctggggtatttgcacatttgcccaaagccgtgtcacgaacgtacaccagctctatgcccttcgtttcttggttggaatgctagaagcacctgtctttgctggaacgcatttcattctcggtaagttcaaccaatatatgtagtcatctggtatactaaccataaaaaaggttcatggtacacaggtcccgaactgttcaaacgagccggaacatggttcatctgcaacccgctcggtactatggttagtggataccttcaggcagcggcttataccaacctttctggtgttgggggtatgccagggtggaggtggctgttcgtaatcgacggcatatttaccatccccgtggccttgctcggattcctcatctttcccggtattccgggctcgcctaagccattctatctgacggaccgtgatattgaattggccaaggagagaactaagagagccaagattcgccagcctggcaaaatgagtctcgacgtctttaagagaacctttaagagatggcacatttgggtctttatcacttgctacgcgtaagtttggaaaggattcactgctgtagtcaatttactaacgttggttttagatgcatgatcatctgctcctatccaagcagctatatgagcctatggctcaaacaagagggatactcagtgactcaaatcaaccagctgccgactgttacttacgcgattaacatcgtggcctcatggctagggacaacattagctgcgatttatccggaatggatcatttacaccattgcatcggcatgctgtctattctcaacattatgcatgatagtttggaacatccctacaggcctgaagtaagataactccttaactagtcctcagattgagtccgtggtactaacaagcttcttcaaagattcgttgcctggtatgtcttcggagcggctggatgcttgagtccaattctatattccaccatcaatgtgatagtgagggatgatgcggaggagcgtgctctcataatggtacggcaattcctttatccagcggacaaaagaaatcatactgaccagcatctttcttgcattacagggctccatgatgacatttggctattcattcaatatctgggttcctttgctggcatacccaaccgccggccccgacggtgcgcctagatggcgaaagggatggccagtatcatttgtctttttcttcctgctgtgggctggtttcgtaacttctgtttacatatggcgaaggtaaaatcccgtcctgaaatattggtgaatattaaactgacatattattatagggagcaaaggaaacaagccttggtgtcaccccaggaaagtagtgacgaggaaacggacactgtagtagttgatgggaccccgacattgaagaactgaatcaaatctcgtagatggttcgatattgatcaaatattatctaaatatctcggatagatactaataaatggcgtttctcgtaatataaggaatagtccggtaacgacatctgccttacggtatactagggccttgggcggtgatctttaatgaaatttacattgtaatattgggacctgtgaattactgtatccggttagttttgcccttcttggtttagcgccctaatacgccgtcacgtaacctctcttcaatgccctccggcataaaagaccagtcttcgctgctcttcctccctttctcccactttttcatttttctgcctctctattttgcactcatcgccgccccctttcttttactctggcccccaccgagtactgcacatttgctttcagcccgatgtactgcccctttcatttttaccggagatgccgcttgatccgatatccagcttataatgcctatcacctagaatcgtaaccactgggatgatacagcatcctgtccttttgtgtcgatgatcctactccttccctagggcagtgactgagcaccatgctataaagatatctaggtctccctctgctagtgtgcctttctgtctctgactcggcgggcctccctttaaatctgtaaagtgctagtataccctcgacgctatatatccctctcctaccgccctacctaaggttacgttatatagccccggctttatagaatagctcctagttatctggctaaacgcccggttatcgttattgtcggtctctccggtccctttctacctaatcggtgaaaactcgaaatcacagctcggtcatataggctaatagcgaaaatactgtatacgccctagaccttggtcgatgctatatcttgtagttaatacgagactgtaactgcgggaatttttgctagtaaactataacttgttatagactgtgtgactaggatggtctagcgtcctcgactataataggttagattataggatctggttgagattatctactcttagtagaagaagaattctatcctccggcctctatcgttatctataaaagagactacagttccaataatatagtaaaactagaatttaaatcgcctttaaattctcctcttcgcctattccttattctctaccagtatctttattttataagtacctgtagtcaccatatcctaaagagtctttagtcgtctcttcacaatatatgtcaagtataagttttcccttatattttttttagccccggagttacgtataatacctcacccgactagacgctgatccttatactagtagccctttagagataaccccttcgctatagccctcttctggtaaggcgtagtaagatagaccgtagactctttcgaatgaaacactttgatctaataggagaaatgccgtatatatatcggccttacgcgtgacttagtgatttccggataggttggtagatctctgtatcggtagggtacgttttgtctcgtgaatcttgtaaatccgacctactcaaaacgcctagaagaggcagggggcggtaggcaggtataaaaggtcgttagaactcctcagactatggaagaggctaactacctatttatagttccttctcttctattctaatacattgcgtttaaatctttcttgcagtatggaaccgatcaattgaacgatatcatctattatcgtccgcctgctaaaaagaaaaaaaaaaaacgtttcaaactgttccaggcacccggttcctacgcctatatctattcacagttatcttcggatagacctacgccagcccatccgtttctacctagccagtactggcgtccgagtcttttattcccagggcatacgccgttcctctaaactaagactttcgactctcaagacattttgcaattgtaagacataccaggtatcgaatacattaattctataataatgcccgataacatttagacgctaagtatcgatcccctggtttaggatcgtgcgacttagagcctgccgttattaatagtcagtaccactcttaagctatcgattctagactagagagcttctaaacactgaaacaatcgatcccacgatcctcgacgatcatacctttctaggtagtaagtagacatcggcaaagcccagcataggcctaagatttcggcccatggcctaacctatataggctataggcccagctcccctaggcctagcctagcnnnnnnnnnnnnnnnnnnnnnnnnnnnnnnnnnnnnnnnnnnnnnnnnnnnnnnnnnnnnnnnnnnnnnnnnnnnnnnnnnnnnnnnnnnnnnnnnnnnnnnnnnnnnnnnnnnnnnnnnnnnnnnnnnnnnnnnnnnnnnnnnnnnnnnnnnnnnnnnnnnnnnnnnnnnnnnnnnnnnnnnnnnnnnnnnnnnnnnnnnnnnnnnnnnnnnnnnnnnnnnnnnnnnnnnnnnnnnnnnnnnnnnnnnnnnnnnnnnnnnnnnnnnnnnnnnnnnnnnnnnnnnnnnnnnnnnnnnnnnnnnnnnnnnnnnnnnnnnnnnnnnnnnnnnnnnnnnnnnnnnnnnnnnnnnnnnnnnnnnnnnnnnnnnnnnnnnnnnnnnnnnnnnnnnnnnnnnnnnnnnnnnnnnnnnnnnnnnnnnnnnnnnnnnnnnnnnnnnnnnnnnnnnnnnnnnnnnnnnnnnnnnnnnnnnnnnnnnnnnnnnnnnnnnnnnnnnnnnnnnnnnnnnnnnnnnnnnnnnnnnnnnnnnnnnnnnnnnnnnnnnnnnnnnnnnnnnnnnnnnnnnnnnnnnnnnnnnnnnnnnnnnnnnnnnnnnnnnnnnnnnnnnnnnnnnnnnnnnnnnnnnnnnnnnnnnnnnnnnnnnnnnnnnnnnnnnnnnnnnnnnnnnnnnnnnnnnnnnnnnnnnnnnnnnnnnnnnnnnnnnnnnnnnnnnnnnnnnnnnnnnnnnnnnnnnnnnnnnnnnnnnnnnnnnnnnnnnnnnnnnnnnnnnnnnnnnnnnnnnnnnnnnnnnnnnnnnnnnnnnnnnnnnnnnnnnnnnnnnnnnnnnnnnnnnnnnnnnnnnnnnnnnnnnnnnnnnnnnnnnnnnnnnnnnnnnnnnnnnnnnnnnnnnnnnnnnnnnnnnnnnnnnnnnnnnnnnnnnnnnnnnnnnnnnnnnnnnnnnnnnnnnnnnnnnnnnnnnnnnnnnnnnnnnnnnnnnnnnnnnnnnnnnnnnnnnnnnnnnnnnnnnnnnnnnnnnnnnnnnnnnnnnnnnnnnnnnnnnnnnnnnnnnnnnnnnnnnnnnnnnnnnnnnnnnnnnnnnnnnnnnnnnnnnnnnnnnnnnnnnnnnnnnnnnnnnnnnnnnnnnnnnnnnnnnnnnnnnnnnnnnnnnnnnnnnnnnnnnnnnnnnnnnnnnnnnnnnnnnnnnnnnnnnnnnnnnnnnnnnnnnnnnnnnnnnnnnnnnnnnnnnnnnnnnnnnnnnnnnnnnnnnnnnnnnnnnnnnnnnnnnnnnnnnnnnnnnnnnnnnnnnnnnnnnnnnnnnnnnnnnnnnnnnnnnnnnnnnnnnnnnnnnnnnnnnnnnnnnnnnnnnnnnnnnnnnnnnnnnnnnnnnnnnnnnnnnnnnnnnnnnnnnnnnnnnnnnnnnnnnnnnnnnnnnnnnnnnnnnnnnnnnnnnnnnnnnnnnnnnnnnnnnnnnnnnnnnnnnnnnnnnnnnnnnnnnnnnnnnnnnnnnnnnnnnnnnnnnnnnnnnnnnnnnnnnnnnnnnnnnnnnnnnnnnnnnnnnnnnnnnnnnnnnnnnnnnnnnnnnnnnnnnnnnnnnnnnnnnnnnnnnnnnnnnnnnnnnnnnnnnnnnnnnnnnnnnnnnnnnnnnnnnnnnnnnnnnnnnnnnnnnnnnnnnnnnnnnnnnnnnnnnnnnnnnnnnnnnnnnnnnnnnnnnnnnnnnnnnnnnnnnnnnnnnnnnnnnnnnnnnnnnnnnnnnnnnnnnnnnnnnnnnnnnnnnnnnnnnnnnnnnnnnnnnnnnnnnnnnnnnnnnnnnnnnnnnnnnnnnnnnnnnnnnnnnnnnnnnnnnnnnnnnnnnnnnnnnnnnnnnnnnnnnnnnnnnnnnnnnnnnnnnnnnnnnnnnnnnnnnnnnnnnnnnnnnnnnnnnnnnnnnnnnnnnnnnnnnnnnnnnnnnnnnnnnnnnnnnnnnnnnnnnnnnnnnnnnnnnnnnnnnnnnnnnnnnnnnnnnnnnnnnnnnnnnnnnnnnnnnnnnnnnnnnnnnnnnnnnnnnnnnnnnnnnnnnnnnnnnnnnnnnnnnnnnnnnnnnnnnnnnnnnnnnnnnnnnnnnnnnnnnnnnnnnnnnnnnnnnnnnnnnnnnnnnnnnnnnnnnnnnnnnnnnnnnnnnnnnnnnnnnnnnnnnnnnnnnnnnnnnnnnnnnnnnnnnnnnnnnnnnnnnnnnnnnnnnnnnnnnnnnnnnnnnnnnnnnnnnnnnnnnnnnnnnnnnnnnnnnnnnnnnnnnnnnnnnnnnnnnnnnnnnnnnnnnnnnnnnnnnnnnnnnnnnnnnnnnnnnnnnnnnnnnnnnnnnnnnnnnnnnnnnnnnnnnnnnnnnnnnnnnnnnnnnnnnnnnnnnnnnnnnnnnnnnnnnnnnnnnnnnnnnnnnnnnnnnnnnnnnnnnnnnnnnnnnnnnnnnnnnnnnnnnnnnnnnnnnnnnnnnnnnnnnnnnnnnnnnnnnnnnnnnnnnnnnnnnnnnnnnnnnnnnnnnnnnnnnnnnnnnnnnnnnnnnnnnnnnnnnnnnnnnnnnnnnnnnnnnnnnnnnnnnnnnnnnnnnnnnnnnnnnnnnnnnnnnnnnnnnnnnnnnnnnnnnnnnnnnnnnnnnnnnnnnnnnnnnnnnnnnnnnnnnnnnnnnnnnnnnnnnnnnnnnnnnnnnnnnnnnnnnnnnnnnnnnnnnnnnnnnnnnnnnnnnnnnnnnnnnnnnnnnnnnnnnnnnnnnnnnnnnnnnnnnnnnnnnnnnnnnnnnnnnnnnnnnnnnnnnnnnnnnnnnnnnnnnnnnnnnnnnnnnnnnnnnnnnnnnnnnnnnnnnnnnnnnnnnnnnnnnnnnnnnnnnnnnnnnnnnnnnnnnnnnnnnnnnnnnnnnnnnnnnnnnnnnnnnnnnnnnnnnnnnnnnnnnnnnnnnnnnnnnnnnnnnnnnnnnnnnnnnnnnnnnnnnnnnnnnnnnnnnnnnnnnnnnnnnnnnnnnnnnnnnnnnnnnnnnnnnnnnnnnnnnnnnnnnnnnnnnnnnnnnnnnnnnnnnnnnnnnnnnnnnnnnnnnnnnnnnnnnnnnnnnnnnnnnnnnnnnnnnnnnnnnnnnnnnnnnnnnnnnnnnnnnnnnnnnnnnnnnnnnnnnnnnnnnnnnnnnnnnnnnnnnnnnnnnnnnnnnnnnnnnnnnnnnnnnnnnnnnnnnnnnnnnnnnnnnnnnnnnnnnnnnnnnnnnnnnnnnnnnnnnnnnnnnnnnnnnnnnnnnnnnnnnnnnnnnnnnnnnnnnnnnnnnnnnnnnnnnnnnnnnnnnnnnnnnnnnnnnnnnnnnnnnnnnnnnnnnnnnnnnnnnnnnnnnnnnnnnnnnnnnnnnnnnnnnnnnnnnnnnnnnnnnnnnnnnnnnnnnnnnnnnnnnnnnnnnnnnnnnnnnnnnnnnnnnnnnnnnnnnnnnnnnnnnnnnnnnnnnnnnnnnnnnnnnnnnnnnnnnnnnnnnnnnnnnnnnnnnnnnnnnnnnnnnnnnnnnnnnnnnnnnnnnnnnnnnnnnnnnnnnnnnnnnnnnnnnnnnnnnnnnnnnnnnnnnnnnnnnnnnnnnnnnnnnnnnnnnnnnnnnnnnnnnnnnnnnnnnnnnnnnnnnnnnnnnnnnnnnnnnnnnnnnnnnnnnnnnnnnnnnnnnnnnnnnnnnnnnnnnnnnnnnnnnnnnnnnnnnnnnnnnnnnnnnnnnnnnnnnnnnnnnnnnnnnnnnnnnnnnnnnnnnnnnnnnnnnnnnnnnnnnnnnnnnnnnnnnnnnnnnnnnnnnnnnnnnnnnnnnnnnnnnnnnnnnnnnnnnnnnnnnnnnnnnnnnnnnnnnnnnnnnnnnnnnnnnnnnnnnnnnnnnnnnnnnnnnnnnnnnnnnnnnnnnnnnnnnnnnnnnnnnnnnnnnnnnnnnnnnnnnnnnnnnnnnnnnnnnnnnnnnnnnnnnnnnnnnnnnnnnnnnnnnnnnnnnnnnnnnnnnnnnnnnnnnnnnnnnnnnnnnnnnnnnnnnnnnnnnnnnnnnnnnnnnnnnnnnnnnnnnnnnnnnnnnnnnnnnnnnnnnnnnnnnnnnnnnnnnnnnnnnnnnnnnnnnnnnnnnnnnnnnnnnnnnnnnnnnnnnnnnnnnnnnnnnnnnnnnnnnnnnnnnnnnnnnnnnnnnnnnnnnnnnnnnnnnnnnnnnnnnnnnnnnnnnnnnnnnnnnnnnnnnnnnnnnnnnnnnnnnnnnnnnnnnnnnnnnnnnnnnnnnnnnnnnnnnnnnnnnnnnnnnnnnnnnnnnnnnnnnnnnnnnnnnnnnnnnnnnnnnnnnnnnnnnnnnnnnnnnnnnnnnnnnnnnnnnnnnnnnnnnnnnnnnnnnnnnnnnnnnnnnnnnnnnnnnnnnnnnnnnnnnnnnnnnnnnnnnnnnnnnnnnnnnnnnnnnnnnnnnnnnnnnnnnnnnnnnnnnnnnnnnnnnnnnnnnnnnnnnnnnnnnnnnnnnnnnnnnnnnnnnnnnnnnnnnnnnnnnnnnnnnnnnnnnnnnnnnnnnnnnnnnnnnnnnnnnnnnnnnnnnnnnnnnnnnnnnnnnnnnnnnnnnnnnnnnnnnnnnnnnnnnnnnnnnnnnnnnnnnnnnnnnnnnnnnnnnnnnnnnnnnnnnnnnnnnnnnnnnnnnnnnnnnnnnnnnnnnnnnnnnnnnnnnnnnnnnnnnnnnnnnnnnnnnnnnnnnnnnnnnnnnnnnnnnnnnnnnnnnnnnnnnnnnnnnnnnnnnnnnnnnnnnnnnnnnnnnnnnnnnnnnnnnnnnnnnnnnnnnnnnnnnnnnnnnnnnnnnnnnnnnnnnnnnnnnnnnnnnnnnnnnnnnnnnnnnnnnnnnnnnnnnnnnnnnnnnnnnnnnnnnnnnnnnnnnnnnnnnnnnnnnnnnnnnnnnnnnnnnnnnnnnnnnnnnnnnnnnnnnnnnnnnnnnnnnnnnnnnnnnnnnnnnnnnnnnnnnnnnnnnnnnnnnnnnnnnnnnnnnnnnnnnnnnnnnnnnnnnnnnnnnnnnnnnnnnnnnnnnnnnnnnnnnnnnnnnnnnnnnnnnnnnnnnnnnnnnnnnnnnnnnnnnnnnnnnnnnnnnnnnnnnnnnnnnnnnnnnnnnnnnnnnnnnnnnnnnnnnnnnnnnnnnnnnnnnnnnnnnnnnnnnnnnnnnnnnnnnnnnnnnnnnnnnnnnnnnnnnnnnnnnnnnnnnnnnnnnnnnnnnnnnnnnnnnnnnnnnnnnnnnnnnnnnnnnnnnnnnnnnnnnnnnnnnnnnnnnnnnnnnnnnnnnnnnnnnnnnnnnnnnnnnnnnnnnnnnnnnnnnnnnnnnnnnnnnnnnnnnnnnnnnnnnnnnnnnnnnnnnnnnnnnnnnnnnnnnnnnnnnnnnnnnnnnnnnnnnnnnnnnnnnnnnnnnnnnnnnnnnnnnnnnnnnnnnnnnnnnnnnnnnnnnnnnnnnnnnnnnnnnnnnnnnnnnnnnnnnnnnnnnnnnnnnnnnnnnnnnnnnnnnnnnnnnnnnnnnnnnnnnnnnnnnnnnnnnnnnnnnnnnnnnnnnnnnnnnnnnnnnnnnnnnnnnnnnnnnnnnnnnnnnnnnnnnnnnnnnnnnnnnnnnnnnnnnnnnnnnnnnnnnnnnnnnnnnnnnnnnnnnnnnnnnnnnnnnnnnnnnnnnnnnnnnnnnnnnnnnnnnnnnnnnnnnnnnnnnnnnnnnnnnnnnnnnnnnnnnnnnnnnnnnnnnnnnnnnnnnnnnnnnnnnnnnnnnnnnnnnnnnnnnnnnnnnnnnnnnnnnnnnnnnnnnnnnnnnnnnnnnnnnnnnnnnnnnnnnnnnnnnnnnnnnnnnnnnnnnnnnnnnnnnnnnnnnnnnnnnnnnnnnnnnnnnnnnnnnnnnnnnnnnnnnnnnnnnnnnnnnnnnnnnnnnnnnnnnnnnnnnnnnnnnnnnnnnnnnnnnnnnnnnnnnnnnnnnnnnnnnnnnnnnnnnnnnnnnnnnnnnnnnnnnnnnnnnnnnnnnnnnnnnnnnnnnnnnnnnnnnnnnnnnnnnnnnnnnnnnnnnnnnnnnnnnnnnnnnnnnnnnnnnnnnnnnnnnnnnnnnnnnnnnnnnnnnnnnnnnnnnnnnnnnnnnnnnnnnnnnnnnnnnnnnnnnnnnnnnnnnnnnnnnnnnnnnnnnnnnnnnnnnnnnnnnnnnnnnnnnnnnnnnnnnnnnnnnnnnnnnnnnnnnnnnnnnnnnnnnnnnnnnnnnnnnnnnnnnnnnnnnnnnnnnnnnnnnnnnnnnnnnnnnnnnnnnnnnnnnnnnnnnnnnnnnnnnnnnnnnnnnnnnnnnnnnnnnnnnnnnnnnnnnnnnnnnnnnnnnnnnnnnnnnnnnnnnnnnnnnnnnnnnnnnnnnnnnnnnnnnnnnnnnnnnnnnnnnnnnnnnnnnnnnnnnnnnnnnnnnnnnnnnnnnnnnnnnnnnnnnnnnnnnnnnnnnnnnnnnnnnnnnnnnnnnnnnnnnnnnnnnnnnnnnnnnnnnnnnnnnnnnnnnnnnnnnnnnnnnnnnnnnnnnnnnnnnnnnnnnnnnnnnnnnnnnnnnnnnnnnnnnnnnnnnnnnnnnnnnnnnnnnnnnnnnnnnnnnnnnnnnnnnnnnnnnnnnnnnnnnnnnnnnnnnnnnnnnnnnnnnnnnnnnnnnnnnnnnnnnnnnnnnnnnnnnnnnnnnnnnnnnnnnnnnnnnnnnnnnnnnnnnnnnnnnnnnnnnnnnnnnnnnnnnnnnnnnnnnnnnnnnnnnnnnnnnnnnnnnnnnnnnnnnnnnnnnnnnnnnnnnnnnnnnnnnnnnnnnnnnnnnnnnnnnnnnnnnnnnnnnnnnnnnnnnnnnnnnnnnnnnnnnnnnnnnnnnnnnnnnnnnnnnnnnnnnnnnnnnnnnnnnnnnnnnnnnnnnnnnnnnnnnnnnnnnnnnnnnnnnnnnnnnnnnnnnnnnnnnnnnnnnnnnnnnnnnnnnnnnnnnnnnnnnnnnnnnnnnnnnnnnnnnnnnnnnnnnnnnnnnnnnnnnnnnnnnnnnnnnnnnnnnnnnnnnnnnnnnnnnnnnnnnnnnnnnnnnnnnnnnnnnnnnnnnnnnnnnnnnnnnnnnnnnnnnnnnnnnnnnnnnnnnnnnnnnnnnnnnnnnnnnnnnnnnnnnnnnnnnnnnnnnnnnnnnnnnnnnnnnnnnnnnnnnnnnnnnnnnnnnnnnnnnnnnnnnnnnnnnnnnnnnnnnnnnnnnnnnnnnnnnnnnnnnnnnnnnnnnnnnnnnnnnnnnnnnnnnnnnnnnnnnnnnnnnnnnnnnnnnnnnnnnnnnnnnnnnnnnnnnnnnnnnnnnnnnnnnnnnnnnnnnnnnnnnnnnnnnnnnnnnnnnnnnnnnnnnnnnnnnnnnnnnnnnnnnnnnnnnnnnnnnnnnnnnnnnnnnnnnnnnnnnnnnnnnnnnnnnnnnnnnnnnnnnnnnnnnnnnnnnnnnnnnnnnnnnnnnnnnnnnnnnnnnnnnnnnnnnnnnnnnnnnnnnnnnnnnnnnnnnnnnnnnnnnnnnnnnnnnnnnnnnnnnnnnnnnnnnnnnnnnnnnnnnnnnnnnnnnnnnnnnnnnnnnnnnnnnnnnnnnnnnnnnnnnnnnnnnnnnnnnnnnnnnnnnnnnnnnnnnnnnnnnnnnnnnnnnnnnnnnnnnnnnnnnnnnnnnnnnnnnnnnnnnnnnnnnnnnnnnnnnnnnnnnnnnnnnnnnnnnnnnnnnnnnnnnnnnnnnnnnnnnnnnnnnnnnnnnnnnnnnnnnnnnnnnnnnnnnnnnnnnnnnnnnnnnnnnnnnnnnnnnnnnnnnnnnnnnnnnnnnnnnnnnnnnnnnnnnnnnnnnnnnnnnnnnnnnnnnnnnnnnnnnnnnnnnnnnnnnnnnnnnnnnnnnnnnnnnnnnnnnnnnnnnnnnnnnnnnnnnnnnnnnnnnnnnnnnnnnnnnnnnnnnnnnnnnnnnnnnnnnnnnnnnnnnnnnnnnnnnnnnnnnnnnnnnnnnnnnnnnnnnnnnnnnnnnnnnnnnnnnnnnnnnnnnnnnnnnnnnnnnnnnnnnnnnnnnnnnnnnnnnnnnnnnnnnnnnnnnnnnnnnnnnnnnnnnnnnnnnnnnnnnnnnnnnnnnnnnnnnnnnnnnnnnnnnnnnnnnnnnnnnnnnnnnnnnnnnnnnnnnnnnnnnnnnnnnnnnnnnnnnnnnnnnnnnnnnnnnnnnnnnnnnnnnnnnnnnnnnnnnnnnnnnnnnnnnnnnnnnnnnnnnnnnnnnnnnnnnnnnnnnnnnnnnnnnnnnnnnnnnnnnnnnnnnnnnnnnnnnnnnnnnnnnnnnnnnnnnnnnnnnnnnnnnnnnnnnnnnnnnnnnnnnnnnnnnnnnnnnnnnnnnnnnnnnnnnnnnnnnnnnnnnnnnnnnnnnnnnnnnnnnnnnnnnnnnnnnnnnnnnnnnnnnnnnnnnnnnnnnnnnnnnnnnnnnnnnnnnnnnnnnnnnnnnnnnnnnnnnnnnnnnnnnnnnnnnnnnnnnnnnnnnnnnnnnnnnnnnnnnnnnnnnnnnnnnnnnnnnnnnnnnnnnnnnnnnnnnnnnnnnnnnnnnnnnnnnnnnnnnnnnnnnnnnnnnnnnnnnnnnnnnnnnnnnnnnnnnnnnnnnnnnnnnnnnnnnnnnnnnnnnnnnnnnnnnnnnnnnnnnnnnnnnnnnnnnnnnnnnnnnnnnnnnnnnnnnnnnnnnnnnnnnnnnnnnnnnnnnnnnnnnnnnnnnnnnnnnnnnnnnnnnnnnnnnnnnnnnnnnnnnnnnnnnnnnnnnnnnnnnnnnnnnnnnnnnnnnnnnnnnnnnnnnnnnnnnnnnnnnnnnnnnnnnnnnnnnnnnnnnnnnnnnnnnnnnnnnnnnnnnnnnnnnnnnnnnnnnnnnnnnnnnnnnnnnnnnnnnnnnnnnnnnnnnnnnnnnnnnnnnnnnnnnnnnnnnnnnnnnnnnnnnnnnnnnnnnnnnnnnnnnnnnnnnnnnnnnnnnnnnnnnnnnnnnnnnnnnnnnnnnnnnnnnnnnnnnnnnnnnnnnnnnnnnnnnnnnnnnnnnnnnnnnnnnnnnnnnnnnnnnnnnnnnnnnnnnnnnnnnnnnnnnnnnnnnnnnnnnnnnnnnnnnnnnnnnnnnnnnnnnnnnnnnnnnnnnnnnnnnnnnnnnnnnnnnnnnnnnnnnnnnnnnnnnnnnnnnnnnnnnnnnnnnnnnnnnnnnnnnnnnnnnnnnnnnnnnnnnnnnnnnnnnnnnnnnnnnnnnnnnnnnnnnnnnnnnnnnnnnnnnnnnnnnnnnnnnnnnnnnnnnnnnnnnnnnnnnnnnnnnnnnnnnnnnnnnnnnnnnnnnnnnnnnnnnnnnnnnnnnnnnnnnnnnnnnnnnnnnnnnnnnnnnnnnnnnnnnnnnnnnnnnnnnnnnnnnnnnnnnnnnnnnnnnnnnnnnnnnnnnnnnnnnnnnnnnnnnnnnnnnnnnnnnnnnnnnnnnnnnnnnnnnnnnnnnnnnnnnnnnnnnnnnnnnnnnnnnnnnnnnnnnnnnnnnnnnnnnnnnnnnnnnnnnnnnnnnnnnnnnnnnnnnnnnnnnnnnnnnnnnnnnnnnnnnnnnnnnnnnnnnnnnnnnnnnnnnnnnnnnnnnnnnnnnnnnnnnnnnnnnnnnnnnnnnnnnnnnnnnnnnnnnnnnnnnnnnnnnnnnnnnnnnnnnnnnnnnnnnnnnnnnnnnnnnnnnnnnnnnnnnnnnnnnnnnnnnnnnnnnnnnnnnnnnnnnnnnnnnnnnnnnnnnnnnnnnnnnnnnnnnnnnnnnnnnnnnnnnnnnnnnnnnnnnnnnnnnnnnnnnnnnnnnnnnnnnnnnnnnnnnnnnnnnnnnnnnnnnnnnnnnnnnnnnnnnnnnnnnnnnnnnnnnnnnnnnnnnnnnnnnnnnnnnnnnnnnnnnnnnnnnnnnnnnnnnnnnnnnnnnnnnnnnnnnnnnnnnnnnnnnnnnnnnnnnnnnnnnnnnnnnnnnnnnnnnnnnnnnnnnnnnnnnnnnnnnnnnnnnnnnnnnnnnnnnnnnnnnnnnnnnnnnnnnnnnnnnnnnnnnnnnnnnnnnnnnnnnnnnnnnnnnnnnnnnnnnnnnnnnnnnnnnnnnnnnnnnnnnnnnnnnnnnnnnnnnnnnnnnnnnnnnnnnnnnnnnnnnnnnnnnnnnnnnnnnnnnnnnnnnnnnnnnnnnnnnnnnnnnnnnnnnnnnnnnnnnnnnnnnnnnnnnnnnnnnnnnnnnnnnnnnnnnnnnnnnnnnnnnnnnnnnnnnnnnnnnnnnnnnnnnnnnnnnnnnnnnnnnnnnnnnnnnnnnnnnnnnnnnnnnnnnnnnnnnnnnnnnnnnnnnnnnnnnnnnnnnnnnnnnnnnnnnnnnnnnnnnnnnnnnnnnnnnnnnnnnnnnnnnnnnnnnnnnnnnnnnnnnnnnnnnnnnnnnnnnnnnnnnnnnnnnnnnnnnnnnnnnnnnnnnnnnnnnnnnnnnnnnnnnnnnnnnnnnnnnnnnnnnnnnnnnnnnnnnnnnnnnnnnnnnnnnnnnnnnnnnnnnnnnnnnnnnnnnnnnnnnnnnnnnnnnnnnnnnnnnnnnnnnnnnnnnnnnnnnnnnnnnnnnnnnnnnnnnnnnnnnnnnnnnnnnnnnnnnnnnnnnnnnnnnnnnnnnnnnnnnnnnnnnnnnnnnnnnnnnnnnnnnnnnnnnnnnnnnnnnnnnnnnnnnnnnnnnnnnnnnnnnnnnnnnnnnnnnnnnnnnnnnnnnnnnnnnnnnnnnnnnnnnnnnnnnnnnnnnnnnnnnnnnnnnnnnnnnnnnnnnnnnnnnnnnnnnnnnnnnnnnnnnnnnnnnnnnnnnnnnnnnnnnnnnnnnnnnnnnnnnnnnnnnnnnnnnnnnnnnnnnnnnnnnnnnnnnnnnnnnnnnnnnnnnnnnnnnnnnnnnnnnnnnnnnnnnnnnnnnnnnnnnnnnnnnnnnnnnnnnnnnnnnnnnnnnnnnnnnnnnnnnnnnnnnnnnnnnnnnnnnnnnnnnnnnnnnnnnnnnnnnnnnnnnnnnnnnnnnnnnnnnnnnnnnnnnnnnnnnnnnnnnnnnnnnnnnnnnnnnnnnnnnnnnnnnnnnnnnnnnnnnnnnnnnnnnnnnnnnnnnnnnnnnnnnnnnnnnnnnnnnnnnnnnnnnnnnnnnnnnnnnnnnnnnnnnnnnnnnnnnnnnnnnnnnnnnnnnnnnnnnnnnnnnnnnnnnnnnnnnnnnnnnnnnnnnnnnnnnnnnnnnnnnnnnnnnnnnnnnnnnnnnnnnnnnnnnnnnnnnnnnnnnnnnnnnnnnnnnnnnnnnnnnnnnnnnnnnnnnnnnnnnnnnnnnnnnnnnnnnnnnnnnnnnnnnnnnnnnnnnnnnnnnnnnnnnnnnnnnnnnnnnnnnnnnnnnnnnnnnnnnnnnnnnnnnnnnnnnnnnnnnnnnnnnnnnnnnnnnnnnnnnnnnnnnnnnnnnnnnnnnnnnnnnnnnnnnnnnnnnnnnnnnnnnnnnnnnnnnnnnnnnnnnnnnnnnnnnnnnnnnnnnnnnnnnnnnnnnnnnnnnnnnnnnnnnnnnnnnnnnnnnnnnnnnnnnnnnnnnnnnnnnnnnnnnnnnnnnnnnnnnnnnnnnnnnnnnnnnnnnnnnnnnnnnnnnnnnnnnnnnnnnnnnnnnnnnnnnnnnnnnnnnnnnnnnnnnnnnnnnnnnnnnnnnnnnnnnnnnnnnnnnnnnnnnnnnnnnnnnnnnnnnnnnnnnnnnnnnnnnnnnnnnnnnnnnnnnnnnnnnnnnnnnnnnnnnnnnnnnnnnnnnnnnnnnnnnnnnnnnnnnnnnnnnnnnnnnnnnnnnnnnnnnnnnnnnnnnnnnnnnnnnnnnnnnnnnnnnnnnnnnnnnnnnnnnnnnnnnnnnnnnnnnnnnnnnnnnnnnnnnnnnnnnnnnnnnnnnnnnnnnnnnnnnnnnnnnnnnnnnnnnnnnnnnnnnnnnnnnnnnnnnnnnnnnnnnnnnnnnnnnnnnnnnnnnnnnnnnnnnnnnnnnnnnnnnnnnnnnnnnnnnnnnnnnnnnnnnnnnnnnnnnnnnnnnnnnnnnnnnnnnnnnnnnnnnnnnnnnnnnnnnnnnnnnnnnnnnnnnnnnnnnnnnnnnnnnnnnnnnnnnnnnnnnnnnnnnnnnnnnnnnnnnnnnnnnnnnnnnnnnnnnnnnnnnnnnnnnnnnnnnnnnnnnnnnnnnnnnnnnnnnnnnnnnnnnnnnnnnnnnnnnnnnnnnnnnnnnnnnnnnnnnnnnnnnnnnnnnnnnnnnnnnnnnnnnnnnnnnnnnnnnnnnnnnnnnnnnnnnnnnnnnnnnnnnnnnnnnnnnnnnnnnnnnnnnnnnnnnnnnnnnnnnnnnnnnnnnnnnnnnnnnnnnnnnnnnnnnnnnnnnnnnnnnnnnnnnnnnnnnnnnnnnnnnnnnnnnnnnnnnnnnnnnnnnnnnnnnnnnnnnnnnnnnnnnnnnnnnnnnnnnnnnnnnnnnnnnnnnnnnnnnnnnnnnnnnnnnnnnnnnnnnnnnnnnnnnnnnnnnnnnnnnnnnnnnnnnnnnnnnnnnnnnnnnnnnnnnnnnnnnnnnnnnnnnnnnnnnnnnnnnnnnnnnnnnnnnnnnnnnnnnnnnnnnnnnnnnnnnnnnnnnnnnnnnnnnnnnnnnnnnnnnnnnnnnnnnnnnnnnnnnnnnnnnnnnnnnnnnnnnnnnnnnnnnnnnnnnnnnnnnnnnnnnnnnnnnnnnnnnnnnnnnnnnnnnnnnnnnnnnnnnnnnnnnnnnnnnnnnnnnnnnnnnnnnnnnnnnnnnnnnnnnnnnnnnnnnnnnnnnnnnnnnnnnnnnnnnnnnnnnnnnnnnnnnnnnnnnnnnnnnnnnnnnnnnnnnnnnnnnnnnnnnnnnnnnnnnnnnnnnnnnnnnnnnnnnnnnnnnnnnnnnnnnnnnnnnnnnnnnnnnnnnnnnnnnnnnnnnnnnnnnnnnnnnnnnnnnnnnnnnnnnnnnnnnnnnnnnnnnnnnnnnnnnnnnnnnnnnnnnnnnnnnnnnnnnnnnnnnnnnnnnnnnnnnnnnnnnnnnnnnnnnnnnnnnnnnnnnnnnnnnnnnnnnnnnnnnnnnnnnnnnnnnnnnnnnnnnnnnnnnnnnnnnnnnnnnnnnnnnnnnnnnnnnnnnnnnnnnnnnnnnnnnnnnnnnnnnnnnnnnnnnnnnnnnnnnnnnnnnnnnnnnnnnnnnnnnnnnnnnnnnnnnnnnnnnnnnnnnnnnnnnnnnnnnnnnnnnnnnnnnnnnnnnnnnnnnnnnnnnnnnnnnnnnnnnnnnnnnnnnnnnnnnnnnnnnnnnnnnnnnnnnnnnnnnnnnnnnnnnnnnnnnnnnnnnnnnnnnnnnnnnnnnnnnnnnnnnnnnnnnnnnnnnnnnnnnnnnnnnnnnnnnnnnnnnnnnnnnnnnnnnnnnnnnnnnnnnnnnnnnnnnnnnnnnnnnnnnnnnnnnnnnnnnnnnnnnnnnnnnnnnnnnnnnnnnnnnnnnnnnnnnnnnnnnnnnnnnnnnnnnnnnnnnnnnnnnnnnnnnnnnnnnnnnnnnnnnnnnnnnnnnnnnnnnnnnnnnnnnnnnnnnnnnnnnnnnnnnnnnnnnnnnnnnnnnnnnnnnnnnnnnnnnnnnnnnnnnnnnnnnnnnnnnnnnnnnnnnnnnnnnnnnnnnnnnnnnnnnnnnnnnnnnnnnnnnnnnnnnnnnnnnnnnnnnnnnnnnnnnnnnnnnnnnnnnnnnnnnnnnnnnnnnnnnnnnnnnnnnnnnnnnnnnnnnnnnnnnnnnnnnnnnnnnnnnnnnnnnnnnnnnnnnnnnnnnnnnnnnnnnnnnnnnnnnnnnnnnnnnnnnnnnnnnnnnnnnnnnnnnnnnnnnnnnnnnnnnnnnnnnnnnnnnnnnnnnnnnnnnnnnnnnnnnnnnnnnnnnnnnnnnnnnnnnnnnnnnnnnnnnnnnnnnnnnnnnnnnnnnnnnnnnnnnnnnnnnnnnnnnnnnnnnnnnnnnnnnnnnnnnnnnnnnnnnnnnnnnnnnnnnnnnnnnnnnnnnnnnnnnnnnnnnnnnnnnnnnnnnnnnnnnnnnnnnnnnnnnnnnnnnnnnnnnnnnnnnnnnnnnnnnnnnnnnnnnnnnnnnnnnnnnnnnnnnnnnnnnnnnnnnnnnnnnnnnnnnnnnnnnnnnnnnnnnnnnnnnnnnnnnnnnnnnnnnnnnnnnnnnnnnnnnnnnnnnnnnnnnnnnnnnnnnnnnnnnnnnnnnnnnnnnnnnnnnnnnnnnnnnnnnnnnnnnnnnnnnnnnnnnnnnnnnnnnnnnnnnnnnnnnnnnnnnnnnnnnnnnnnnnnnnnnnnnnnnnnnnnnnnnnnnnnnnnnnnnnnnnnnnnnnnnnnnnnnnnnnnnnnnnnnnnnnnnnnnnnnnnnnnnnnnnnnnnnnnnnnnnnnnnnnnnnnnnnnnnnnnnnnnnnnnnnnnnnnnnnnnnnnnnnnnnnnnnnnnnnnnnnnnnnnnnnnnnnnnnnnnnnnnnnnnnnnnnnnnnnnnnnnnnnnnnnnnnnnnnnnnnnnnnnnnnnnnnnnnnnnnnnnnnnnnnnnnnnnnnnnnnnnnnnnnnnnnnnnnnnnnnnnnnnnnnnnnnnnnnnnnnnnnnnnnnnnnnnnnnnnnnnnnnnnnnnnnnnnnnnnnnnnnnnnnnnnnnnnnnnnnnnnnnnnnnnnnnnnnnnnnnnnnnnnnnnnnnnnnnnnnnnnnnnnnnnnnnnnnnnnnnnnnnnnnnnnnnnnnnnnnnnnnnnnnnnnnnnnnnnnnnnnnnnnnnnnnnnnnnnnnnnnnnnnnnnnnnnnnnnnnnnnnnnnnnnnnnnnnnnnnnnnnnnnnnnnnnnnnnnnnnnnnnnnnnnnnnnnnnnnnnnnnnnnnnnnnnnnnnnnnnnnnnnnnnnnnnnnnnnnnnnnnnnnnnnnnnnnnnnnnnnnnnnnnnnnnnnnnnnnnnnnnnnnnnnnnnnnnnnnnnnnnnnnnnnnnnnnnnnnnnnnnnnnnnnnnnnnnnnnnnnnnnnnnnnnnnnnnnnnnnnnnnnnnnnnnnnnnnnnnnnnnnnnnnnnnnnnnnnnnnnnnnnnnnnnnnnnnnnnnnnnnnnnnnnnnnnnnnnnnnnnnnnnnnnnnnnnnnnnnnnnnnnnnnnnnnnnnnnnnnnnnnnnnnnnnnnnnnnnnnnnnnnnnnnnnnnnnnnnnnnnnnnnnnnnnnnnnnnnnnnnnnnnnnnnnnnnnnnnnnnnnnnnnnnnnnnnnnnnnnnnnnnnnnnnnnnnnnnnnnnnnnnnnnnnnnnnnnnnnnnnnnnnnnnnnnnnnnnnnnnnnnnnnnnnnnnnnnnnnnnnnnnnnnnnnnnnnnnnnnnnnnnnnnnnnnnnnnnnnnnnnnnnnnnnnnnnnnnnnnnnnnnnnnnnnnnnnnnnnnnnnnnnnnnnnnnnnnnnnnnnnnnnnnnnnnnnnnnnnnnnnnnnnnnnnnnnnnnnnnnnnnnnnnnnnnnnnnnnnnnnnnnnnnnnnnnnnnnnnnnnnnnnnnnnnnnnnnnnnnnnnnnnnnnnnnnnnnnnnnnnnnnnnnnnnnnnnnnnnnnnnnnnnnnnnnnnnnnnnnnnnnnnnnnnnnnnnnnnnnnnnnnnnnnnnnnnnnnnnnnnnnnnnnnnnnnnnnnnnnnnnnnnnnnnnnnnnnnnnnnnnnnnnnnnnnnnnnnnnnnnnnnnnnnnnnnnnnnnnnnnnnnnnnnnnnnnnnnnnnnnnnnnnnnnnnnnnnnnnnnnnnnnnnnnnnnnnnnnnnnnnnnnnnnnnnnnnnnnnnnnnnnnnnnnnnnnnnnnnnnnnnnnnnnnnnnnnnnnnnnnnnnnnnnnnnnnnnnnnnnnnnnnnnnnnnnnnnnnnnnnnnnnnnnnnnnnnnnnnnnnnnnnnnnnnnnnnnnnnnnnnnnnnnnnnnnnnnnnnnnnnnnnnnnnnnnnnnnnnnnnnnnnnnnnnnnnnnnnnnnnnnnnnnnnnnnnnnnnnnnnnnnnnnnnnnnnnnnnnnnnnnnnnnnnnnnnnnnnnnnnnnnnnnnnnnnnnnnnnnnnnnnnnnnnnnnnnnnnnnnnnnnnnnnnnnnnnnnnnnnnnnnnnnnnnnnnnnnnnnnnnnnnnnnnnnnnnnnnnnnnnnnnnnnnnnnnnnnnnnnnnnnnnnnnnnnnnnnnnnnnnnnnnnnnnnnnnnnnnnnnnnnnnnnnnnnnnnnnnnnnnnnnnnnnnnnnnnnnnnnnnnnnnnnnnnnnnnnnnnnnnnnnnnnnnnnnnnnnnnnnnnnnnnnnnnnnnnnnnnnnnnnnnnnnnnnnnnnnnnnnnnnnnnnnnnnnnnnnnnnnnnnnnnnnnnnnnnnnnnnnnnnnnnnnnnnnnnnnnnnnnnnnnnnnnnnnnnnnnnnnnnnnnnnnnnnnnnnnnnnnnnnnnnnnnnnnnnnnnnnnnnnnnnnnnnnnnnnnnnnnnnnnnnnnnnnnnnnnnnnnnnnnnnnnnnnnnnnnnnnnnnnnnnnnnnnnnnnnnnnnnnnnnnnnnnnnnnnnnnnnnnnnnnnnnnnnnnnnnnnnnnnnnnnnnnnnnnnnnnnnnnnnnnnnnnnnnnnnnnnnnnnnnnnnnnnnnnnnnnnnnnnnnnnnnnnnnnnnnnnnnnnnnnnnnnnnnnnnnnnnnnnnnnnnnnnnnnnnnnnnnnnnnnnnnnnnnnnnnnnnnnnnnnnnnnnnnnnnnnnnnnnnnnnnnnnnnnnnnnnnnnnnnnnnnnnnnnnnnnnnnnnnnnnnnnnnnnnnnnnnnnnnnnnnnnnnnnnnnnnnnnnnnnnnnnnnnnnnnnnnnnnnnnnnnnnnnnnnnnnnnnnnnnnnnnnnnnnnnnnnnnnnnnnnnnnnnnnnnnnnnnnnnnnnnnnnnnnnnnnnnnnnnnnnnnnnnnnnnnnnnnnnnnnnnnnnnnnnnnnnnnnnnnnnnnnnnnnnnnnnnnnnnnnnnnnnnnnnnnnnnnnnnnnnnnnnnnnnnnnnnnnnnnnnnnnnnnnnnnnnnnnnnnnnnnnnnnnnnnnnnnnnnnnnnnnnnnnnnnnnnnnnnnnnnnnnnnnnnnnnnnnnnnnnnnnnnnnnnnnnnnnnnnnnnnnnnnnnnnnnnnnnnnnnnnnnnnnnnnnnnnnnnnnnnnnnnnnnnnnnnnnnnnnnnnnnnnnnnnnnnnnnnnnnnnnnnnnnnnnnnnnnnnnnnnnnnnnnnnnnnnnnnnnnnnnnnnnnnnnnnnnnnnnnnnnnnnnnnnnnnnnnnnnnnnnnnnnnnnnnnnnnnnnnnnnnnnnnnnnnnnnnnnnnnnnnnnnnnnnnnnnnnnnnnnnnnnnnnnnnnnnnnnnnnnnnnnnnnnnnnnnnnnnnnnnnnnnnnnnnnnnnnnnnnnnnnnnnnnnnnnnnnnnnnnnnnnnnnnnnnnnnnnnnnnnnnnnnnnnnnnnnnnnnnnnnnnnnnnnnnnnnnnnnnnnnnnnnnnnnnnnnnnnnnnnnnnnnnnnnnnnnnnnnnnnnnnnnnnnnnnnnnnnnnnnnnnnnnnnnnnnnnnnnnnnnnnnnnnnnnnnnnnnnnnnnnnnnnnnnnnnnnnnnnnnnnnnnnnnnnnnnnnnnnnnnnnnnnnnnnnnnnnnnnnnnnnnnnnnnnnnnnnnnnnnnnnnnnnnnnnnnnnnnnnnnnnnnnnnnnnnnnnnnnnnnnnnnnnnnnnnnnnnnnnnnnnnnnnnnnnnnnnnnnnnnnnnnnnnnnnnnnnnnnnnnnnnnnnnnnnnnnnnnnnnnnnnnnnnnnnnnnnnnnnnnnnnnnnnnnnnnnnnnnnnnnnnnnnnnnnnnnnnnnnnnnnnnnnnnnnnnnnnnnnnnnnnnnnnnnnnnnnnnnnnnnnnnnnnnnnnnnnnnnnnnnnnnnnnnnnnnnnnnnnnnnnnnnnnnnnnnnnnnnnnnnnnnnnnnnnnnnnnnnnnnnnnnnnnnnnnnnnnnnnnnnnnnnnnnnnnnnnnnnnnnnnnnnnnnnnnnnnnnnnnnnnnnnnnnnnnnnnnnnnnnnnnnnnnnnnnnnnnnnnnnnnnnnnnnnnnnnnnnnnnnnnnnnnnnnnnnnnnnnnnnnnnnnnnnnnnnnnnnnnnnnnnnnnnnnnnnnnnnnnnnnnnnnnnnnnnnnnnnnnnnnnnnnnnnnnnnnnnnnnnnnnnnnnnnnnnnnnnnnnnnnnnnnnnnnnnnnnnnnnnnnnnnnnnnnnnnnnnnnnnnnnnnnnnnnnnnnnnnnnnnnnnnnnnnnnnnnnnnnnnnnnnnnnnnnnnnnnnnnnnnnnnnnnnnnnnnnnnnnnnnnnnnnnnnnnnnnnnnnnnnnnnnnnnnnnnnnnnnnnnnnnnnnnnnnnnnnnnnnnnnnnnnnnnnnnnnnnnnnnnnnnnnnnnnnnnnnnnnnnnnnnnnnnnnnnnnnnnnnnnnnnnnnnnnnnnnnnnnnnnnnnnnnnnnnnnnnnnnnnnnnnnnnnnnnnnnnnnnnnnnnnnnnnnnnnnnnnnnnnnnnnnnnnnnnnnnnnnnnnnnnnnnnnnnnnnnnnnnnnnnnnnnnnnnnnnnnnnnnnnnnnnnnnnnnnnnnnnnnnnnnnnnnnnnnnnnnnnnnnnnnnnnnnnnnnnnnnnnnnnnnnnnnnnnnnnnnnnnnnnnnnnnnnnnnnnnnnnnnnnnnnnnnnnnnnnnnnnnnnnnnnnnnnnnnnnnnnnnnnnnnnnnnnnnnnnnnnnnnnnnnnnnnnnnnnnnnnnnnnnnnnnnnnnnnnnnnnnnnnnnnnnnnnnnnnnnnnnnnnnnnnnnnnnnnnnnnnnnnnnnnnnnnnnnnnnnnnnnnnnnnnnnnnnnnnnnnnnnnnnnnnnnnnnnnnnnnnnnnnnnnnnnnnnnnnnnnnnnnnnnnnnnnnnnnnnnnnnnnnnnnnnnnnnnnnnnnnnnnnnnnnnnnnnnnnnnnnnnnnnnnnnnnnnnnnnnnnnnnnnnnnnnnnnnnnnnnnnnnnnnnnnnnnnnnnnnnnnnnnnnnnnnnnnnnnnnnnnnnnnnnnnnnnnnnnnnnnnnnnnnnnnnnnnnnnnnnnnnnnnnnnnnnnnnnnnnnnnnnnnnnnnnnnnnnnnnnnnnnnnnnnnnnnnnnnnnnnnnnnnnnnnnnnnnnnnnnnnnnnnnnnnnnnnnnnnnnnnnnnnnnnnnnnnnnnnnnnnnnnnnnnnnnnnnnnnnnnnnnnnnnnnnnnnnnnnnnnnnnnnnnnnnnnnnnnnnnnnnnnnnnnnnnnnnnnnnnnnnnnnnnnnnnnnnnnnnnnnnnnnnnnnnnnnnnnnnnnnnnnnnnnnnnnnnnnnnnnnnnnnnnnnnnnnnnnnnnnnnnnnnnnnnnnnnnnnnnnnnnnnnnnnnnnnnnnnnnnnnnnnnnnnnnnnnnnnnnnnnnnnnnnnnnnnnnnnnnnnnnnnnnnnnnnnnnnnnnnnnnnnnnnnnnnnnnnnnnnnnnnnnnnnnnnnnnnnnnnnnnnnnnnnnnnnnnnnnnnnnnnnnnnnnnnnnnnnnnnnnnnnnnnnnnnnnnnnnnnnnnnnnnnnnnnnnnnnnnnnnnnnnnnnnnnnnnnnnnnnnnnnnnnnnnnnnnnnnnnnnnnnnnnnnnnnnnnnnnnnnnnnnnnnnnnnnnnnnnnnnnnnnnnnnnnnnnnnnnnnnnnnnnnnnnnnnnnnnnnnnnnnnnnnnnnnnnnnnnnnnnnnnnnnnnnnnnnnnnnnnnnnnnnnnnnnnnnnnnnnnnnnnnnnnnnnnnnnnnnnnnnnnnnnnnnnnnnnnnnnnnnnnnnnnnnnnnnnnnnnnnnnnnnnnnnnnnnnnnnnnnnnnnnnnnnnnnnnnnnnnnnnnnnnnnnnnnnnnnnnnnnnnnnnnnnnnnnnnnnnnnnnnnnnnnnnnnnnnnnnnnnnnnnnnnnnnnnnnnnnnnnnnnnnnnnnnnnnnnnnnnnnnnnnnnnnnnnnnnnnnnnnnnnnnnnnnnnnnnnnnnnnnnnnnnnnnnnnnnnnnnnnnnnnnnnnnnnnnnnnnnnnnnnnnnnnnnnnnnnnnnnnnnnnnnnnnnnnnnnnnnnnnnnnnnnnnnnnnnnnnnnnnnnnnnnnnnnnnnnnnnnnnnnnnnnnnnnnnnnnnnnnnnnnnnnnnnnnnnnnnnnnnnnnnnnnnnnnnnnnnnnnnnnnnnnnnnnnnnnnnnnnnnnnnnnnnnnnnnnnnnnnnnnnnnnnnnnnnnnnnnnnnnnnnnnnnnnnnnnnnnnnnnnnnnnnnnnnnnnnnnnnnnnnnnnnnnnnnnnnnnnnnnnnnnnnnnnnnnnnnnnnnnnnnnnnnnnnnnnnnnnnnnnnnnnnnnnnnnnnnnnnnnnnnnnnnnnnnnnnnnnnnnnnnnnnnnnnnnnnnnnnnnnnnnnnnnnnnnnnnnnnnnnnnnnnnnnnnnnnnnnnnnnnnnnnnnnnnnnnnnnnnnnnnnnnnnnnnnnnnnnnnnnnnnnnnnnnnnnnnnnnnnnnnnnnnnnnnnnnnnnnnnnnnnnnnnnnnnnnnnnnnnnnnnnnnnnnnnnnnnnnnnnnnnnnnnnnnnnnnnnnnnnnnnnnnnnnnnnnnnnnnnnnnnnnnnnnnnnnnnnnnnnnnnnnnnnnnnnnnnnnnnnnnnnnnnnnnnnnnnnnnnnnnnnnnnnnnnnnnnnnnnnnnnnnnnnnnnnnnnnnnnnnnnnnnnnnnnnnnnnnnnnnnnnnnnnnnnnnnnnnnnnnnnnnnnnnnnnnnnnnnnnnnnnnnnnnnnnnnnnnnnnnnnnnnnnnnnnnnnnnnnnnnnnnnnnnnnnnnnnnnnnnnnnnnnnnnnnnnnnnnnnnnnnnnnnnnnnnnnnnnnnnnnnnnnnnnnnnnnnnnnnnnnnnnnnnnnnnnnnnnnnnnnnnnnnnnnnnnnnnnnnnnnnnnnnnnnnnnnnnnnnnnnnnnnnnnnnnnnnnnnnnnnnnnnnnnnnnnnnnnnnnnnnnnnnnnnnnnnnnnnnnnnnnnnnnnnnnnnnnnnnnnnnnnnnnnnnnnnnnnnnnnnnnnnnnnnnnnnnnnnnnnnnnnnnnnnnnnnnnnnnnnnnnnnnnnnnnnnnnnnnnnnnnnnnnnnnnnnnnnnnnnnnnnnnnnnnnnnnnnnnnnnnnnnnnnnnnnnnnnnnnnnnnnnnnnnnnnnnnnnnnnnnnnnnnnnnnnnnnnnnnnnnnnnnnnnnnnnnnnnnnnnnnnnnnnnnnnnnnnnnnnnnnnnnnnnnnnnnnnnnnnnnnnnnnnnnnnnnnnnnnnnnnnnnnnnnnnnnnnnnnnnnnnnnnnnnnnnnnnnnnnnnnnnnnnnnnnnnnnnnnnnnnnnnnnnnnnnnnnnnnnnnnnnnnnnnnnnnnnnnnnnnnnnnnnnnnnnnnnnnnnnnnnnnnnnnnnnnnnnnnnnnnnnnnnnnnnnnnnnnnnnnnnnnnnnnnnnnnnnnnnnnnnnnnnnnnnnnnnnnnnnnnnnnnnnnnnnnnnnnnnnnnnnnnnnnnnnnnnnnnnnnnnnnnnnnnnnnnnnnnnnnnnnnnnnnnnnnnnnnnnnnnnnnnnnnnnnnnnnnnnnnnnnnnnnnnnnnnnnnnnnnnnnnnnnnnnnnnnnnnnnnnnnnnnnnnnnnnnnnnnnnnnnnnnnnnnnnnnnnnnnnnnnnnnnnnnnnnnnnnnnnnnnnnnnnnnnnnnnnnnnnnnnnnnnnnnnnnnnnnnnnnnnnnnnnnnnnnnnnnnnnnnnnnnnnnnnnnnnnnnnnnnnnnnnnnnnnnnnnnnnnnnnnnnnnnnnnnnnnnnnnnnnnnnnnnnnnnnnnnnnnnnnnnnnnnnnnnnnnnnnnnnnnnnnnnnnnnnnnnnnnnnnnnnnnnnnnnnnnnnnnnnnnnnnnnnnnnnnnnnnnnnnnnnnnnnnnnnnnnnnnnnnnnnnnnnnnnnnnnnnnnnnnnnnnnnnnnnnnnnnnnnnnnnnnnnnnnnnnnnnnnnnnnnnnnnnnnnnnnnnnnnnnnnnnnnnnnnnnnnnnnnnnnnnnnnnnnnnnnnnnnnnnnnnnnnnnnnnnnnnnnnnnnnnnnnnnnnnnnnnnnnnnnnnnnnnnnnnnnnnnnnnnnnnnnnnnnnnnnnnnnnnnnnnnnnnnnnnnnnnnnnnnnnnnnnnnnnnnnnnnnnnnnnnnnnnnnnnnnnnnnnnnnnnnnnnnnnnnnnnnnnnnnnnnnnnnnnnnnnnnnnnnnnnnnnnnnnnnnnnnnnnnnnnnnnnnnnnnnnnnnnnnnnnnnnnnnnnnnnnnnnnnnnnnnnnnnnnnnnnnnnnnnnnnnnnnnnnnnnnnnnnnnnnnnnnnnnnnnnnnnnnnnnnnnnnnnnnnnnnnnnnnnnnnnnnnnnnnnnnnnnnnnnnnnnnnnnnnnnnnnnnnnnnnnnnnnnnnnnnnnnnnnnnnnnnnnnnnnnnnnnnnnnnnnnnnnnnnnnnnnnnnnnnnnnnnnnnnnnnnnnnnnnnnnnnnnnnnnnnnnnnnnnnnnnnnnnnnnnnnnnnnnnnnnnnnnnnnnnnnnnnnnnnnnnnnnnnnnnnnnnnnnnnnnnnnnnnnnnnnnnnnnnnnnnnnnnnnnnnnnnnnnnnnnnnnnnnnnnnnnnnnnnnnnnnnnnnnnnnnnnnnnnnnnnnnnnnnnnnnnnnnnnnnnnnnnnnnnnnnnnnnnnnnnnnnnnnnnnnnnnnnnnnnnnnnnnnnnnnnnnnnnnnnnnnnnnnnnnnnnnnnnnnnnnnnnnnnnnnnnnnnnnnnnnnnnnnnnnnnnnnnnnnnnnnnnnnnnnnnnnnnnnnnnnnnnnnnnnnnnnnnnnnnnnnnnnnnnnnnnnnnnnnnnnnnnnnnnnnnnnnnnnnnnnnnnnnnnnnnnnnnnnnnnnnnnnnnnnnnnnnnnnnnnnnnnnnnnnnnnnnnnnnnnnnnnnnnnnnnnnnnnnnnnnnnnnnnnnnnnnnnnnnnnnnnnnnnnnnnnnnnnnnnnnnnnnnnnnnnnnnnnnnnnnnnnnnnnnnnnnnnnnnnnnnnnnnnnnnnnnnnnnnnnnnnnnnnnnnnnnnnnnnnnnnnnnnnnnnnnnnnnnnnnnnnnnnnnnnnnnnnnnnnnnnnnnnnnnnnnnnnnnnnnnnnnnnnnnnnnnnnnnnnnnnnnnnnnnnnnnnnnnnnnnnnnnnnnnnnnnnnnnnnnnnnnnnnnnnnnnnnnnnnnnnnnnnnnnnnnnnnnnnnnnnnnnnnnnnnnnnnnnnnnnnnnnnnnnnnnnnnnnnnnnnnnnnnnnnnnnnnnnnnnnnnnnnnnnnnnnnnnnnnnnnnnnnnnnnnnnnnnnnnnnnnnnnnnnnnnnnnnnnnnnnnnnnnnnnnnnnnnnnnnnnnnnnnnnnnnnnnnnnnnnnnnnnnnnnnnnnnnnnnnnnnnnnnnnnnnnnnnnnnnnnnnnnnnnnnnnnnnnnnnnnnnnnnnnnnnnnnnnnnnnnnnnnnnnnnnnnnnnnnnnnnnnnnnnnnnnnnnnnnnnnnnnnnnnnnnnnnnnnnnnnnnnnnnnnnnnnnnnnnnnnnnnnnnnnnnnnnnnnnnnnnnnnnnnnnnnnnnnnnnnnnnnnnnnnnnnnnnnnnnnnnnnnnnnnnnnnnnnnnnnnnnnnnnnnnnnnnnnnnnnnnnnnnnnnnnnnnnnnnnnnnnnnnnnnnnnnnnnnnnnnnnnnnnnnnnnnnnnnnnnnnnnnnnnnnnnnnnnnnnnnnnnnnnnnnnnnnnnnnnnnnnnnnnnnnnnnnnnnnnnnnnnnnnnnnnnnnnnnnnnnnnnnnnnnnnnnnnnnnnnnnnnnnnnnnnnnnnnnnnnnnnnnnnnnnnnnnnnnnnnnnnnnnnnnnnnnnnnnnnnnnnnnnnnnnnnnnnnnnnnnnnnnnnnnnnnnnnnnnnnnnnnnnnnnnnnnnnnnnnnnnnnnnnnnnnnnnnnnnnnnnnnnnnnnnnnnnnnnnnnnnnnnnnnnnnnnnnnnnnnnnnnnnnnnnnnnnnnnnnnnnnnnnnnnnnnnnnnnnnnnnnnnnnnnnnnnnnnnnnnnnnnnnnnnnnnnnnnnnnnnnnnnnnnnnnnnnnnnnnnnnnnnnnnnnnnnnnnnnnnnnnnnnnnnnnnnnnnnnnnnnnnnnnnnnnnnnnnnnnnnnnnnnnnnnnnnnnnnnnnnnnnnnnnnnnnnnnnnnnnnnnnnnnnnnnnnnnnnnnnnnnnnnnnnnnnnnnnnnnnnnnnnnnnnnnnnnnnnnnnnnnnnnnnnnnnnnnnnnnnnnnnnnnnnnnnnnnnnnnnnnnnnnnnnnnnnnnnnnnnnnnnnnnnnnnnnnnnnnnnnnnnnnnnnnnnnnnnnnnnnnnnnnnnnnnnnnnnnnnnnnnnnnnnnnnnnnnnnnnnnnnnnnnnnnnnnnnnnnnnnnnnnnnnnnnnnnnnnnnnnnnnnnnnnnnnnnnnnnnnnnnnnnnnnnnnnnnnnnnnnnnnnnnnnnnnnnnnnnnnnnnnnnnnnnnnnnnnnnnnnnnnnnnnnnnnnnnnnnnnnnnnnnnnnnnnnnnnnnnnnnnnnnnnnnnnnnnnnnnnnnnnnnnnnnnnnnnnnnnnnnnnnnnnnnnnnnnnnnnnnnnnnnnnnnnnnnnnnnnnnnnnnnnnnnnnnnnnnnnnnnnnnnnnnnnnnnnnnnnnnnnnnnnnnnnnnnnnnnnnnnnnnnnnnnnnnnnnnnnnnnnnnnnnnnnnnnnnnnnnnnnnnnnnnnnnnnnnnnnnnnnnnnnnnnnnnnnnnnnnnnnnnnnnnnnnnnnnnnnnnnnnnnnnnnnnnnnnnnnnnnnnnnnnnnnnnnnnnnnnnnnnnnnnnnnnnnnnnnnnnnnnnnnnnnnnnnnnnnnnnnnnnnnnnnnnnnnnnnnnnnnnnnnnnnnnnnnnnnnnnnnnnnnnnnnnnnnnnnnnnnnnnnnnnnnnnnnnnnnnnnnnnnnnnnnnnnnnnnnnnnnnnnnnnnnnnnnnnnnnnnnnnnnnnnnnnnnnnnnnnnnnnnnnnnnnnnnnnnnnnnnnnnnnnnnnnnnnnnnnnnnnnnnnnnnnnnnnnnnnnnnnnnnnnnnnnnnnnnnnnnnnnnnnnnnnnnnnnnnnnnnnnnnnnnnnnnnnnnnnnnnnnnnnnnnnnnnnnnnnnnnnnnnnnnnnnnnnnnnnnnnnnnnnnnnnnnnnnnnnnnnnnnnnnnnnnnnnnnnnnnnnnnnnnnnnnnnnnnnnnnnnnnnnnnnnnnnnnnnnnnnnnnnnnnnnnnnnnnnnnnnnnnnnnnnnnnnnnnnnnnnnnnnnnnnnnnnnnnnnnnnnnnnnnnnnnnnnnnnnnnnnnnnnnnnnnnnnnnnnnnnnnnnnnnnnnnnnnnnnnnnnnnnnnnnnnnnnnnnnnnnnnnnnnnnnnnnnnnnnnnnnnnnnnnnnnnnnnnnnnnnnnnnnnnnnnnnnnnnnnnnnnnnnnnnnnnnnnnnnnnnnnnnnnnnnnnnnnnnnnnnnnnnnnnnnnnnnnnnnnnnnnnnnnnnnnnnnnnnnnnnnnnnnnnnnnnnnnnnnnnnnnnnnnnnnnnnnnnnnnnnnnnnnnnnnnnnnnnnnnnnnnnnnnnnnnnnnnnnnnnnnnnnnnnnnnnnnnnnnnnnnnnnnnnnnnnnnnnnnnnnnnnnnnnnnnnnnnnnnnnnnnnnnnnnnnnnnnnnnnnnnnnnnnnnnnnnnnnnnnnnnnnnnnnnnnnnnnnnnnnnnnnnnnnnnnnnnnnnnnnnnnnnnnnnnnnnnnnnnnnnnnnnnnnnnnnnnnnnnnnnnnnnnnnnnnnnnnnnnnnnnnnnnnnnnnnnnnnnnnnnnnnnnnnnnnnnnnnnnnnnnnnnnnnnnnnnnnnnnnnnnnnnnnnnnnnnnnnnnnnnnnnnnnnnnnnnnnnnnnnnnnnnnnnnnnnnnnnnnnnnnnnnnnnnnnnnnnnnnnnnnnnnnnnnnnnnnnnnnnnnnnnnnnnnnnnnnnnnnnnnnnnnnnnnnnnnnnnnnnnnnnnnnnnnnnnnnnnnnnnnnnnnnnnnnnnnnnnnnnnnnnnnnnnnnnnnnnnnnnnnnnnnnnnnnnnnnnnnnnnnnnnnnnnnnnnnnnnnnnnnnnnnnnnnnnnnnnnnnnnnnnnnnnnnnnnnnnnnnnnnnnnnnnnnnnnnnnnnnnnnnnnnnnnnnnnnnnnnnnnnnnnnnnnnnnnnnnnnnnnnnnnnnnnnnnnnnnnnnnnnnnnnnnnnnnnnnnnnnnnnnnnnnnnnnnnnnnnnnnnnnnnnnnnnnnnnnnnnnnnnnnnnnnnnnnnnnnnnnnnnnnnnnnnnnnnnnnnnnnnnnnnnnnnnnnnnnnnnnnnnnnnnnnnnnnnnnnnnnnnnnnnnnnnnnnnnnnnnnnnnnnnnnnnnnnnnnnnnnnnnnnnnnnnnnnnnnnnnnnnnnnnnnnnnnnnnnnnnnnnnnnnnnnnnnnnnnnnnnnnnnnnnnnnnnnnnnnnnnnnnnnnnnnnnnnnnnnnnnnnnnnnnnnnnnnnnnnnnnnnnnnnnnnnnnnnnnnnnnnnnnnnnnnnnnnnnnnnnnnnnnnnnnnnnnnnnnnnnnnnnnnnnnnnnnnnnnnnnnnnnnnnnnnnnnnnnnnnnnnnnnnnnnnnnnnnnnnnnnnnnnnnnnnnnnnnnnnnnnnnnnnnnnnnnnnnnnnnnnnnnnnnnnnnnnnnnnnnnnnnnnnnnnnnnnnnnnnnnnnnnnnnnnnnnnnnnnnnnnnnnnnnnnnnnnnnnnnnnnnnnnnnnnnnnnnnnnnnnnnnnnnnnnnnnnnnnnnnnnnnnnnnnnnnnnnnnnnnnnnnnnnnnnnnnnnnnnnnnnnnnnnnnnnnnnnnnnnnnnnnnnnnnnnnnnnnnnnnnnnnnnnnnnnnnnnnnnnnnnnnnnnnnnnnnnnnnnnnnnnnnnnnnnnnnnnnnnnnnnnnnnnnnnnnnnnnnnnnnnnnnnnnnnnnnnnnnnnnnnnnnnnnnnnnnnnnnnnnnnnnnnnnnnnnnnnnnnnnnnnnnnnnnnnnnnnnnnnnnnnnnnnnnnnnnnnnnnnnnnnnnnnnnnnnnnnnnnnnnnnnnnnnnnnnnnnnnnnnnnnnnnnnnnnnnnnnnnnnnnnnnnnnnnnnnnnnnnnnnnnnnnnnnnnnnnnnnnnnnnnnnnnnnnnnnnnnnnnnnnnnnnnnnnnnnnnnnnnnnnnnnnnnnnnnnnnnnnnnnnnnnnnnnnnnnnnnnnnnnnnnnnnnnnnnnnnnnnnnnnnnnnnnnnnnnnnnnnnnnnnnnnnnnnnnnnnnnnnnnnnnnnnnnnnnnnnnnnnnnnnnnnnnnnnnnnnnnnnnnnnnnnnnnnnnnnnnnnnnnnnnnnnnnnnnnnnnnnnnnnnnnnnnnnnnnnnnnnnnnnnnnnnnnnnnnnnnnnnnnnnnnnnnnnnnnnnnnnnnnnnnnnnnnnnnnnnnnnnnnnnnnnnnnnnnnnnnnnnnnnnnnnnnnnnnnnnnnnnnnnnnnnnnnnnnnnnnnnnnnnnnnnnnnnnnnnnnnnnnnnnnnnnnnnnnnnnnnnnnnnnnnnnnnnnnnnnnnnnnnnnnnnnnnnnnnnnnnnnnnnnnnnnnnnnnnnnnnnnnnnnnnnnnnnnnnnnnnnnnnnnnnnnnnnnnnnnnnnnnnnnnnnnnnnnnnnnnnnnnnnnnnnnnnnnnnnnnnnnnnnnnnnnnnnnnnnnnnnnnnnnnnnnnnnnnnnnnnnnnnnnnnnnnnnnnnnnnnnnnnnnnnnnnnnnnnnnnnnnnnnnnnnnnnnnnnnnnnnnnnnnnnnnnnnnnnnnnnnnnnnnnnnnnnnnnnnnnnnnnnnnnnnnnnnnnnnnnnnnnnnnnnnnnnnnnnnnnnnnnnnnnnnnnnnnnnnnnnnnnnnnnnnnnnnnnnnnnnnnnnnnnnnnnnnnnnnnnnnnnnnnnnnnnnnnnnnnnnnnnnnnnnnnnnnnnnnnnnnnnnnnnnnnnnnnnnnnnnnnnnnnnnnnnnnnnnnnnnnnnnnnnnnnnnnnnnnnnnnnnnnnnnnnnnnnnnnnnnnnnnnnnnnnnnnnnnnnnnnnnnnnnnnnnnnnnnnnnnnnnnnnnnnnnnnnnnnnnnnnnnnnnnnnnnnnnnnnnnnnnnnnnnnnnnnnnnnnnnnnnnnnnnnnnnnnnnnnnnnnnnnnnnnnnnnnnnnnnnnnnnnnnnnnnnnnnnnnnnnnnnnnnnnnnnnnnnnnnnnnnnnnnnnnnnnnnnnnnnnnnnnnnnnnnnnnnnnnnnnnnnnnnnnnnnnnnnnnnnnnnnnnnnnnnnnnnnnnnnnnnnnnnnnnnnnnnnnnnnnnnnnnnnnnnnnnnnnnnnnnnnnnnnnnnnnnnnnnnnnnnnnnnnnnnnnnnnnnnnnnnnnnnnnnnnnnnnnnnnnnnnnnnnnnnnnnnnnnnnnnnnnnnnnnnnnnnnnnnnnnnnnnnnnnnnnnnnnnnnnnnnnnnnnnnnnnnnnnnnnnnnnnnnnnnnnnnnnnnnnnnnnnnnnnnnnnnnnnnnnnnnnnnnnnnnnnnnnnnnnnnnnnnnnnnnnnnnnnnnnnnnnnnnnnnnnnnnnnnnnnnnnnnnnnnnnnnnnnnnnnnnnnnnnnnnnnnnnnnnnnnnnnnnnnnnnnnnnnnnnnnnnnnnnnnnnnnnnnnnnnnnnnnnnnnnnnnnnnnnnnnnnnnnnnnnnnnnnnnnnnnnnnnnnnnnnnnnnnnnnnnnnnnnnnnnnnnnnnnnnnnnnnnnnnnnnnnnnnnnnnnnnnnnnnnnnnnnnnnnnnnnnnnnnnnnnnnnnnnnnnnnnnnnnnnnnnnnnnnnnnnnnnnnnnnnnnnnnnnnnnnnnnnnnnnnnnnnnnnnnnnnnnnnnnnnnnnnnnnnnnnnnnnnnnnnnnnnnnnnnnnnnnnnnnnnnnnnnnnnnnnnnnnnnnnnnnnnnnnnnnnnnnnnnnnnnnnnnnnnnnnnnnnnnnnnnnnnnnnnnnnnnnnnnnnnnnnnnnnnnnnnnnnnnnnnnnnnnnnnnnnnnnnnnnnnnnnnnnnnnnnnnnnnnnnnnnnnnnnnnnnnnnnnnnnnnnnnnnnnnnnnnnnnnnnnnnnnnnnnnnnnnnnnnnnnnnnnnnnnnnnnnnnnnnnnnnnnnnnnnnnnnnnnnnnnnnnnnnnnnnnnnnnnnnnnnnnnnnnnnnnnnnnnnnnnnnnnnnnnnnnnnnnnnnnnnnnnnnnnnnnnnnnnnnnnnnnnnnnnnnnnnnnnnnnnnnnnnnnnnnnnnnnnnnnnnnnnnnnnnnnnnnnnnnnnnnnnnnnnnnnnnnnnnnnnnnnnnnnnnnnnnnnnnnnnnnnnnnnnnnnnnnnnnnnnnnnnnnnnnnnnnnnnnnnnnnnnnnnnnnnnnnnnnnnnnnnnnnnnnnnnnnnnnnnnnnnnnnnnnnnnnnnnnnnnnnnnnnnnnnnnnnnnnnnnnnnnnnnnnnnnnnnnnnnnnnnnnnnnnnnnnnnnnnnnnnnnnnnnnnnnnnnnnnnnnnnnnnnnnnnnnnnnnnnnnnnnnnnnnnnnnnnnnnnnnnnnnnnnnnnnnnnnnnnnnnnnnnnnnnnnnnnnnnnnnnnnnnnnnnnnnnnnnnnnnnnnnnnnnnnnnnnnnnnnnnnnnnnnnnnnnnnnnnnnnnnnnnnnnnnnnnnnnnnnnnnnnnnnnnnnnnnnnnnnnnnnnnnnnnnnnnnnnnnnnnnnnnnnnnnnnnnnnnnnnnnnnnnnnnnnnnnnnnnnnnnnnnnnnnnnnnnnnnnnnnnnnnnnnnnnnnnnnnnnnnnnnnnnnnnnnnnnnnnnnnnnnnnnnnnnnnnnnnnnnnnnnnnnnnnnnnnnnnnnnnnnnnnnnnnnnnnnnnnnnnnnnnnnnnnnnnnnnnnnnnnnnnnnnnnnnnnnnnnnnnnnnnnnnnnnnnnnnnnnnnnnnnnnnnnnnnnnnnnnnnnnnnnnnnnnnnnnnnnnnnnnnnnnnnnnnnnnnnnnnnnnnnnnnnnnnnnnnnnnnnnnnnnnnnnnnnnnnnnnnnnnnnnnnnnnnnnnnnnnnnnnnnnnnnnnnnnnnnnnnnnnnnnnnnnnnnnnnnnnnnnnnnnnnnnnnnnnnnnnnnnnnnnnnnnnnnnnnnnnnnnnnnnnnnnnnnnnnnnnnnnnnnnnnnnnnnnnnnnnnnnnnnnnnnnnnnnnnnnnnnnnnnnnnnnnnnnnnnnnnnnnnnnnnnnnnnnnnnnnnnnnnnnnnnnnnnnnnnnnnnnnnnnnnnnnnnnnnnnnnnnnnnnnnnnnnnnnnnnnnnnnnnnnnnnnnnnnnnnnnnnnnnnnnnnnnnnnnnnnnnnnnnnnnnnnnnnnnnnnnnnnnnnnnnnnnnnnnnnnnnnnnnnnnnnnnnnnnnnnnnnnnnnnnnnnnnnnnnnnnnnnnnnnnnnnnnnnnnnnnnnnnnnnnnnnnnnnnnnnnnnnnnnnnnnnnnnnnnnnnnnnnnnnnnnnnnnnnnnnnnnnnnnnnnnnnnnnnnnnnnnnnnnnnnnnnnnnnnnnnnnnnnnnnnnnnnnnnnnnnnnnnnnnnnnnnnnnnnnnnnnnnnnnnnnnnnnnnnnnnnnnnnnnnnnnnnnnnnnnnnnnnnnnnnnnnnnnnnnnnnnnnnnnnnnnnnnnnnnnnnnnnnnnnnnnnnnnnnnnnnnnnnnnnnnnnnnnnnnnnnnnnnnnnnnnnnnnnnnnnnnnnnnnnnnnnnnnnnnnnnnnnnnnnnnnnnnnnnnnnnnnnnnnnnnnnnnnnnnnnnnnnnnnnnnnnnnnnnnnnnnnnnnnnnnnnnnnnnnnnnnnnnnnnnnnnnnnnnnnnnnnnnnnnnnnnnnnnnnnnnnnnnnnnnnnnnnnnnnnnnnnnnnnnnnnnnnnnnnnnnnnnnnnnnnnnnnnnnnnnnnnnnnnnnnnnnnnnnnnnnnnnnnnnnnnnnnnnnnnnnnnnnnnnnnnnnnnnnnnnnnnnnnnnnnnnnnnnnnnnnnnnnnnnnnnnnnnnnnnnnnnnnnnnnnnnnnnnnnnnnnnnnnnnnnnnnnnnnnnnnnnnnnnnnnnnnnnnnnnnnnnnnnnnnnnnnnnnnnnnnnnnnnnnnnnnnnnnnnnnnnnnnnnnnnnnnnnnnnnnnnnnnnnnnnnnnnnnnnnnnnnnnnnnnnnnnnnnnnnnnnnnnnnnnnnnnnnnnnnnnnnnnnnnnnnnnnnnnnnnnnnnnnnnnnnnnnnnnnnnnnnnnnnnnnnnnnnnnnnnnnnnnnnnnnnnnnnnnnnnnnnnnnnnnnnnnnnnnnnnnnnnnnnnnnnnnnnnnnnnnnnnnnnnnnnnnnnnnnnnnnnnnnnnnnnnnnnnnnnnnnnnnnnnnnnnnnnnnnnnnnnnnnnnnnnnnnnnnnnnnnnnnnnnnnnnnnnnnnnnnnnnnnnnnnnnnnnnnnnnnnnnnnnnnnnnnnnnnnnnnnnnnnnnnnnnnnnnnnnnnnnnnnnnnnnnnnnnnnnnnnnnnnnnnnnnnnnnnnnnnnnnnnnnnnnnnnnnnnnnnnnnnnnnnnnnnnnnnnnnnnnnnnnnnnnnnnnnnnnnnnnnnnnnnnnnnnnnnnnnnnnnnnnnnnnnnnnnnnnnnnnnnnnnnnnnnnnnnnnnnnnnnnnnnnnnnnnnnnnnnnnnnnnnnnnnnnnnnnnnnnnnnnnnnnnnnnnnnnnnnnnnnnnnnnnnnnnnnnnnnnnnnnnnnnnnnnnnnnnnnnnnnnnnnnnnnnnnnnnnnnnnnnnnnnnnnnnnnnnnnnnnnnnnnnnnnnnnnnnnnnnnnnnnnnnnnnnnnnnnnnnnnnnnnnnnnnnnnnnnnnnnnnnnnnnnnnnnnnnnnnnnnnnnnnnnnnnnnnnnnnnnnnnnnnnnnnnnnnnnnnnnnnnnnnnnnnnnnnnnnnnnnnnnnnnnnnnnnnnnnnnnnnnnnnnnnnnnnnnnnnnnnnnnnnnnnnnnnnnnnnnnnnnnnnnnnnnnnnnnnnnnnnnnnnnnnnnnnnnnnnnnnnnnnnnnnnnnnnnnnnnnnnnnnnnnnnnnnnnnnnnnnnnnnnnnnnnnnnnnnnnnnnnnnnnnnnnnnnnnnnnnnnnnnnnnnnnnnnnnnnnnnnnnnnnnnnnnnnnnnnnnnnnnnnnnnnnnnnnnnnnnnnnnnnnnnnnnnnnnnnnnnnnnnnnnnnnnnnnnnnnnnnnnnnnnnnnnnnnnnnnnnnnnnnnnnnnnnnnnnnnnnnnnnnnnnnnnnnnnnnnnnnnnnnnnnnnnnnnnnnnnnnnnnnnnnnnnnnnnnnnnnnnnnnnnnnnnnnnnnnnnnnnnnnnnnnnnnnnnnnnnnnnnnnnnnnnnnnnnnnnnnnnnnnnnnnnnnnnnnnnnnnnnnnnnnnnnnnnnnnnnnnnnnnnnnnnnnnnnnnnnnnnnnnnnnnnnnnnnnnnnnnnnnnnnnnnnnnnnnnnnnnnnnnnnnnnnnnnnnnnnnnnnnnnnnnnnnnnnnnnnnnnnnnnnnnnnnnnnnnnnnnnnnnnnnnnnnnnnnnnnnnnnnnnnnnnnnnnnnnnnnnnnnnnnnnnnnnnnnnnnnnnnnnnnnnnnnnnnnnnnnnnnnnnnnnnnnnnnnnnnnnnnnnnnnnnnnnnnnnnnnnnnnnnnnnnnnnnnnnnnnnnnnnnnnnnnnnnnnnnnnnnnnnnnnnnnnnnnnnnnnnnnnnnnnnnnnnnnnnnnnnnnnnnnnnnnnnnnnnnnnnnnnnnnnnnnnnnnnnnnnnnnnnnnnnnnnnnnnnnnnnnnnnnnnnnnnnnnnnnnnnnnnnnnnnnnnnnnnnnnnnnnnnnnnnnnnnnnnnnnnnnnnnnnnnnnnnnnnnnnnnnnnnnnnnnnnnnnnnnnnnnnnnnnnnnnnnnnnnnnnnnnnnnnnnnnnnnnnnnnnnnnnnnnnnnnnnnnnnnnnnnnnnnnnnnnnnnnnnnnnnnnnnnnnnnnnnnnnnnnnnnnnnnnnnnnnnnnnnnnnnnnnnnnnnnnnnnnnnnnnnnnnnnnnnnnnnnnnnnnnnnnnnnnnnnnnnnnnnnnnnnnnnnnnnnnnnnnnnnnnnnnnnnnnnnnnnnnnnnnnnnnnnnnnnnnnnnnnnnnnnnnnnnnnnnnnnnnnnnnnnnnnnnnnnnnnnnnnnnnnnnnnnnnnnnnnnnnnnnnnnnnnnnnnnnnnnnnnnnnnnnnnnnnnnnnnnnnnnnnnnnnnnnnnnnnnnnnnnnnnnnnnnnnnnnnnnnnnnnnnnnnnnnnnnnnnnnnnnnnnnnnnnnnnnnnnnnnnnnnnnnnnnnnnnnnnnnnnnnnnnnnnnnnnnnnnnnnnnnnnnnnnnnnnnnnnnnnnnnnnnnnnnnnnnnnnnnnnnnnnnnnnnnnnnnnnnnnnnnnnnnnnnnnnnnnnnnnnnnnnnnnnnnnnnnnnnnnnnnnnnnnnnnnnnnnnnnnnnnnnnnnnnnnnnnnnnnnnnnnnnnnnnnnnnnnnnnnnnnnnnnnnnnnnnnnnnnnnnnnnnnnnnnnnnnnnnnnnnnnnnnnnnnnnnnnnnnnnnnnnnnnnnnnnnnnnnnnnnnnnnnnnnnnnnnnnnnnnnnnnnnnnnnnnnnnnnnnnnnnnnnnnnnnnnnnnnnnnnnnnnnnnnnnnnnnnnnnnnnnnnnnnnnnnnnnnnnnnnnnnnnnnnnnnnnnnnnnnnnnnnnnnnnnnnnnnnnnnnnnnnnnnnnnnnnnnnnnnnnnnnnnnnnnnnnnnnnnnnnnnnnnnnnnnnnnnnnnnnnnnnnnnnnnnnnnnnnnnnnnnnnnnnnnnnnnnnnnnnnnnnnnnnnnnnnnnnnnnnnnnnnnnnnnnnnnnnnnnnnnnnnnnnnnnnnnnnnnnnnnnnnnnnnnnnnnnnnnnnnnnnnnnnnnnnnnnnnnnnnnnnnnnnnnnnnnnnnnnnnnnnnnnnnnnnnnnnnnnnnnnnnnnnnnnnnnnnnnnnnnnnnnnnnnnnnnnnnnnnnnnnnnnnnnnnnnnnnnnnnnnnnnnnnnnnnnnnnnnnnnnnnnnnnnnnnnnnnnnnnnnnnnnnnnnnnnnnnnnnnnnnnnnnnnnnnnnnnnnnnnnnnnnnnnnnnnnnnnnnnnnnnnnnnnnnnnnnnnnnnnnnnnnnnnnnnnnnnnnnnnnnnnnnnnnnnnnnnnnnnnnnnnnnnnnnnnnnnnnnnnnnnnnnnnnnnnnnnnnnnnnnnnnnnnnnnnnnnnnnnnnnnnnnnnnnnnnnnnnnnnnnnnnnnnnnnnnnnnnnnnnnnnnnnnnnnnnnnnnnnnnnnnnnnnnnnnnnnnnnnnnnnnnnnnnnnnnnnnnnnnnnnnnnnnnnnnnnnnnnnnnnnnnnnnnnnnnnnnnnnnnnnnnnnnnnnnnnnnnnnnnnnnnnnnnnnnnnnnnnnnnnnnnnnnnnnnnnnnnnnnnnnnnnnnnnnnnnnnnnnnnnnnnnnnnnnnnnnnnnnnnnnnnnnnnnnnnnnnnnnnnnnnnnnnnnnnnnnnnnnnnnnnnnnnnnnnnnnnnnnnnnnnnnnnnnnnnnnnnnnnnnnnnnnnnnnnnnnnnnnnnnnnnnnnnnnnnnnnnnnnnnnnnnnnnnnnnnnnnnnnnnnnnnnnnnnnnnnnnnnnnnnnnnnnnnnnnnnnnnnnnnnnnnnnnnnnnnnnnnnnnnnnnnnnnnnnnnnnnnnnnnnnnnnnnnnnnnnnnnnnnnnnnnnnnnnnnnnnnnnnnnnnnnnnnnnnnnnnnnnnnnnnnnnnnnnnnnnnnnnnnnnnnnnnnnnnnnnnnnnnnnnnnnnnnnnnnnnnnnnnnnnnnnnnnnnnnnnnnnnnnnnnnnnnnnnnnnnnnnnnnnnnnnnnnnnnnnnnnnnnnnnnnnnnnnnnnnnnnnnnnnnnnnnnnnnnnnnnnnnnnnnnnnnnnnnnnnnnnnnnnnnnnnnnnnnnnnnnnnnnnnnnnnnnnnnnnnnnnnnnnnnnnnnnnnnnnnnnnnnnnnnnnnnnnnnnnnnnnnnnnnnnnnnnnnnnnnnnnnnnnnnnnnnnnnnnnnnnnnnnnnnnnnnnnnnnnnnnnnnnnnnnnnnnnnnnnnnnnnnnnnnnnnnnnnnnnnnnnnnnnnnnnnnnnnnnnnnnnnnnnnnnnnnnnnnnnnnnnnnnnnnnnnnnnnnnnnnnnnnnnnnnnnnnnnnnnnnnnnnnnnnnnnnnnnnnnnnnnnnnnnnnnnnnnnnnnnnnnnnnnnnnnnnnnnnnnnnnnnnnnnnnnnnnnnnnnnnnnnnnnnnnnnnnnnnnnnnnnnnnnnnnnnnnnnnnnnnnnnnnnnnnnnnnnnnnnnnnnnnnnnnnnnnnnnnnnnnnnnnnnnnnnnnnnnnnnnnnnnnnnnnnnnnnnnnnnnnnnnnnnnnnnnnnnnnnnnnnnnnnnnnnnnnnnnnnnnnnnnnnnnnnnnnnnnnnnnnnnnnnnnnnnnnnnnnnnnnnnnnnnnnnnnnnnnnnnnnnnnnnnnnnnnnnnnnnnnnnnnnnnnnnnnnnnnnnnnnnnnnnnnnnnnnnnnnnnnnnnnnnnnnnnnnnnnnnnnnnnnnnnnnnnnnnnnnnnnnnnnnnnnnnnnnnnnnnnnnnnnnnnnnnnnnnnnnnnnnnnnnnnnnnnnnnnnnnnnnnnnnnnnnnnnnnnnnnnnnnnnnnnnnnnnnnnnnnnnnnnnnnnnnnnnnnnnnnnnnnnnnnnnnnnnnnnnnnnnnnnnnnnnnnnnnnnnnnnnnnnnnnnnnnnnnnnnnnnnnnnnnnnnnnnnnnnnnnnnnnnnnnnnnnnnnnnnnnnnnnnnnnnnnnnnnnnnnnnnnnnnnnnnnnnnnnnnnnnnnnnnnnnnnnnnnnnnnnnnnnnnnnnnnnnnnnnnnnnnnnnnnnnnnnnnnnnnnnnnnnnnnnnnnnnnnnnnnnnnnnnnnnnnnnnnnnnnnnnnnnnnnnnnnnnnnnnnnnnnnnnnnnnnnnnnnnnnnnnnnnnnnnnnnnnnnnnnnnnnnnnnnnnnnnnnnnnnnnnnnnnnnnnnnnnnnnnnnnnnnnnnnnnnnnnnnnnnnnnnnnnnnnnnnnnnnnnnnnnnnnnnnnnnnnnnnnnnnnnnnnnnnnnnnnnnnnnnnnnnnnnnnnnnnnnnnnnnnnnnnnnnnnnnnnnnnnnnnnnnnnnnnnnnnnnnnnnnnnnnnnnnnnnnnnnnnnnnnnnnnnnnnnnnnnnnnnnnnnnnnnnnnnnnnnnnnnnnnnnnnnnnnnnnnnnnnnnnnnnnnnnnnnnnnnnnnnnnnnnnnnnnnnnnnnnnnnnnnnnnnnnnnnnnnnnnnnnnnnnnnnnnnnnnnnnnnnnnnnnnnnnnnnnnnnnnnnnnnnnnnnnnnnnnnnnnnnnnnnnnnnnnnnnnnnnnnnnnnnnnnnnnnnnnnnnnnnnnnnnnnnnnnnnnnnnnnnnnnnnnnnnnnnnnnnnnnnnnnnnnnnnnnnnnnnnnnnnnnnnnnnnnnnnnnnnnnnnnnnnnnnnnnnnnnnnnnnnnnnnnnnnnnnnnnnnnnnnnnnnnnnnnnnnnnnnnnnnnnnnnnnnnnnnnnnnnnnnnnnnnnnnnnnnnnnnnnnnnnnnnnnnnnnnnnnnnnnnnnnnnnnnnnnnnnnnnnnnnnnnnnnnnnnnnnnnnnnnnnnnnnnnnnnnnnnnnnnnnnnnnnnnnnnnnnnnnnnnnnnnnnnnnnnnnnnnnnnnnnnnnnnnnnnnnnnnnnnnnnnnnnnnnnnnnnnnnnnnnnnnnnnnnnnnnnnnnnnnnnnnnnnnnnnnnnnnnnnnnnnnnnnnnnnnnnnnnnnnnnnnnnnnnnnnnnnnnnnnnnnnnnnnnnnnnnnnnnnnnnnnnnnnnnnnnnnnnnnnnnnnnnnnnnnnnnnnnnnnnnnnnnnnnnnnnnnnnnnnnnnnnnnnnnnnnnnnnnnnnnnnnnnnnnnnnnnnnnnnnnnnnnnnnnnnnnnnnnnnnnnnnnnnnnnnnnnnnnnnnnnnnnnnnnnnnnnnnnnnnnnnnnnnnnnnnnnnnnnnnnnnnnnnnnnnnnnnnnnnnnnnnnnnnnnnnnnnnnnnnnnnnnnnnnnnnnnnnnnnnnnnnnnnnnnnnnnnnnnnnnnnnnnnnnnnnnnnnnnnnnnnnnnnnnnnnnnnnnnnnnnnnnnnnnnnnnnnnnnnnnnnnnnnnnnnnnnnnnnnnnnnnnnnnnnnnnnnnnnnnnnnnnnnnnnnnnnnnnnnnnnnnnnnnnnnnnnnnnnnnnnnnnnnnnnnnnnnnnnnnnnnnnnnnnnnnnnnnnnnnnnnnnnnnnnnnnnnnnnnnnnnnnnnnnnnnnnnnnnnnnnnnnnnnnnnnnnnnnnnnnnnnnnnnnnnnnnnnnnnnnnnnnnnnnnnnnnnnnnnnnnnnnnnnnnnnnnnnnnnnnnnnnnnnnnnnnnnnnnnnnnnnnnnnnnnnnnnnnnnnnnnnnnnnnnnnnnnnnnnnnnnnnnnnnnnnnnnnnnnnnnnnnnnnnnnnnnnnnnnnnnnnnnnnnnnnnnnnnnnnnnnnnnnnnnnnnnnnnnnnnnnnnnnnnnnnnnnnnnnnnnnnnnnnnnnnnnnnnnnnnnnnnnnnnnnnnnnnnnnnnnnnnnnnnnnnnnnnnnnnnnnnnnnnnnnnnnnnnnnnnnnnnnnnnnnnnnnnnnnnnnnnnnnnnnnnnnnnnnnnnnnnnnnnnnnnnnnnnnnnnnnnnnnnnnnnnnnnnnnnnnnnnnnnnnnnnnnnnnnnnnnnnnnnnnnnnnnnnnnnnnnnnnnnnnnnnnnnnnnnnnnnnnnnnnnnnnnnnnnnnnnnnnnnnnnnnnnnnnnnnnnnnnnnnnnnnnnnnnnnnnnnnnnnnnnnnnnnnnnnnnnnnnnnnnnnnnnnnnnnnnnnnnnnnnnnnnnnnnnnnnnnnnnnnnnnnnnnnnnnnnnnnnnnnnnnnnnnnnnnnnnnnnnnnnnnnnnnnnnnnnnnnnnnnnnnnnnnnnnnnnnnnnnnnnnnnnnnnnnnnnnnnnnnnnnnnnnnnnnnnnnnnnnnnnnnnnnnnnnnnnnnnnnnnnnnnnnnnnnnnnnnnnnnnnnnnnnnnnnnnnnnnnnnnnnnnnnnnnnnnnnnnnnnnnnnnnnnnnnnnnnnnnnnnnnnnnnnnnnnnnnnnnnnnnnnnnnnnnnnnnnnnnnnnnnnnnnnnnnnnnnnnnnnnnnnnnnnnnnnnnnnnnnnnnnnnnnnnnnnnnnnnnnnnnnnnnnnnnnnnnnnnnnnnnnnnnnnnnnnnnnnnnnnnnnnnnnnnnnnnnnnnnnnnnnnnnnnnnnnnnnnnnnnnnnnnnnnnnnnnnnnnnnnnnnnnnnnnnnnnnnnnnnnnnnnnnnnnnnnnnnnnnnnnnnnnnnnnnnnnnnnnnnnnnnnnnnnnnnnnnnnnnnnnnnnnnnnnnnnnnnnnnnnnnnnnnnnnnnnnnnnnnnnnnnnnnnnnnnnnnnnnnnnnnnnnnnnnnnnnnnnnnnnnnnnnnnnnnnnnnnnnnnnnnnnnnnnnnnnnnnnnnnnnnnnnnnnnnnnnnnnnnnnnnnnnnnnnnnnnnnnnnnnnnnnnnnnnnnnnnnnnnnnnnnnnnnnnnnnnnnnnnnnnnnnnnnnnnnnnnnnnnnnnnnnnnnnnnnnnnnnnnnnnnnnnnnnnnnnnnnnnnnnnnnnnnnnnnnnnnnnnnnnnnnnnnnnnnnnnnnnnnnnnnnnnnnnnnnnnnnnnnnnnnnnnnnnnnnnnnnnnnnnnnnnnnnnnnnnnnnnnnnnnnnnnnnnnnnnnnnnnnnnnnnnnnnnnnnnnnnnnnnnnnnnnnnnnnnnnnnnnnnnnnnnnnnnnnnnnnnnnnnnnnnnnnnnnnnnnnnnnnnnnnnnnnnnnnnnnnnnnnnnnnnnnnnnnnnnnnnnnnnnnnnnnnnnnnnnnnnnnnnnnnnnnnnnnnnnnnnnnnnnnnnnnnnnnnnnnnnnnnnnnnnnnnnnnnnnnnnnnnnnnnnnnnnnnnnnnnnnnnnnnnnnnnnnnnnnnnnnnnnnnnnnnnnnnnnnnnnnnnnnnnnnnnnnnnnnnnnnnnnnnnnnnnnnnnnnnnnnnnnnnnnnnnnnnnnnnnnnnnnnnnnnnnnnnnnnnnnnnnnnnnnnnnnnnnnnnnnnnnnnnnnnnnnnnnnnnnnnnnnnnnnnnnnnnnnnnnnnnnnnnnnnnnnnnnnnnnnnnnnnnnnnnnnnnnnnnnnnnnnnnnnnnnnnnnnnnnnnnnnnnnnnnnnnnnnnnnnnnnnnnnnnnnnnnnnnnnnnnnnnnnnnnnnnnnnnnnnnnnnnnnnnnnnnnnnnnnnnnnnnnnnnnnnnnnnnnnnnnnnnnnnnnnnnnnnnnnnnnnnnnnnnnnnnnnnnnnnnnnnnnnnnnnnnnnnnnnnnnnnnnnnnnnnnnnnnnnnnnnnnnnnnnnnnnnnnnnnnnnnnnnnnnnnnnnnnnnnnnnnnnnnnnnnnnnnnnnnnnnnnnnnnnnnnnnnnnnnnnnnnnnnnnnnnnnnnnnnnnnnnnnnnnnnnnnnnnnnnnnnnnnnnnnnnnnnnnnnnnnnnnnnnnnnnnnnnnnnnnnnnnnnnnnnnnnnnnnnnnnnnnnnnnnnnnnnnnnnnnnnnnnnnnnnnnnnnnnnnnnnnnnnnnnnnnnnnnnnnnnnnnnnnnnnnnnnnnnnnnnnnnnnnnnnnnnnnnnnnnnnnnnnnnnnnnnnnnnnnnnnnnnnnnnnnnnnnnnnnnnnnnnnnnnnnnnnnnnnnnnnnnnnnnnnnnnnnnnnnnnnnnnnnnnnnnnnnnnnnnnnnnnnnnnnnnnnnnnnnnnnnnnnnnnnnnnnnnnnnnnnnnnnnnnnnnnnnnnnnnnnnnnnnnnnnnnnnnnnnnnnnnnnnnnnnnnnnnnnnnnnnnnnnnnnnnnnnnnnnnnnnnnnnnnnnnnnnnnnnnnnnnnnnnnnnnnnnnnnnnnnnnnnnnnnnnnnnnnnnnnnnnnnnnnnnnnnnnnnnnnnnnnnnnnnnnnnnnnnnnnnnnnnnnnnnnnnnnnnnnnnnnnnnnnnnnnnnnnnnnnnnnnnnnnnnnnnnnnnnnnnnnnnnnnnnnnnnnnnnnnnnnnnnnnnnnnnnnnnnnnnnnnnnnnnnnnnnnnnnnnnnnnnnnnnnnnnnnnnnnnnnnnnnnnnnnnnnnnnnnnnnnnnnnnnnnnnnnnnnnnnnnnnnnnnnnnnnnnnnnnnnnnnnnnnnnnnnnnnnnnnnnnnnnnnnnnnnnnnnnnnnnnnnnnnnnnnnnnnnnnnnnnnnnnnnnnnnnnnnnnnnnnnnnnnnnnnnnnnnnnnnnnnnnnnnnnnnnnnnnnnnnnnnnnnnnnnnnnnnnnnnnnnnnnnnnnnnnnnnnnnnnnnnnnnnnnnnnnnnnnnnnnnnnnnnnnnnnnnnnnnnnnnnnnnnnnnnnnnnnnnnnnnnnnnnnnnnnnnnnnnnnnnnnnnnnnnnnnnnnnnnnnnnnnnnnnnnnnnnnnnnnnnnnnnnnnnnnnnnnnnnnnnnnnnnnnnnnnnnnnnnnnnnnnnnnnnnnnnnnnnnnnnnnnnnnnnnnnnnnnnnnnnnnnnnnnnnnnnnnnnnnnnnnnnnnnnnnnnnnnnnnnnnnnnnnnnnnnnnnnnnnnnnnnnnnnnnnnnnnnnnnnnnnnnnnnnnnnnnnnnnnnnnnnnnnnnnnnnnnnnnnnnnnnnnnnnnnnnnnnnnnnnnnnnnnnnnnnnnnnnnnnnnnnnnnnnnnnnnnnnnnnnnnnnnnnnnnnnnnnnnnnnnnnnnnnnnnnnnnnnnnnnnnnnnnnnnnnnnnnnnnnnnnnnnnnnnnnnnnnnnnnnnnnnnnnnnnnnnnnnnnnnnnnnnnnnnnnnnnnnnnnnnnnnnnnnnnnnnnnnnnnnnnnnnnnnnnnnnnnnnnnnnnnnnnnnnnnnnnnnnnnnnnnnnnnnnnnnnnnnnnnnnnnnnnnnnnnnnnnnnnnnnnnnnnnnnnnnnnnnnnnnnnnnnnnnnnnnnnnnnnnnnnnnnnnnnnnnnnnnnnnnnnnnnnnnnnnnnnnnnnnnnnnnnnnnnnnnnnnnnnnnnnnnnnnnnnnnnnnnnnnnnnnnnnnnnnnnnnnnnnnnnnnnnnnnnnnnnnnnnnnnnnnnnnnnnnnnnnnnnnnnnnnnnnnnnnnnnnnnnnnnnnnnnnnnnnnnnnnnnnnnnnnnnnnnnnnnnnnnnnnnnnnnnnnnnnnnnnnnnnnnnnnnnnnnnnnnnnnnnnnnnnnnnnnnnnnnnnnnnnnnnnnnnnnnnnnnnnnnnnnnnnnnnnnnnnnnnnnnnnnnnnnnnnnnnnnnnnnnnnnnnnnnnnnnnnnnnnnnnnnnnnnnnnnnnnnnnnnnnnnnnnnnnnnnnnnnnnnnnnnnnnnnnnnnnnnnnnnnnnnnnnnnnnnnnnnnnnnnnnnnnnnnnnnnnnnnnnnnnnnnnnnnnnnnnnnnnnnnnnnnnnnnnnnnnnnnnnnnnnnnnnnnnnnnnnnnnnnnnnnnnnnnnnnnnnnnnnnnnnnnnnnnnnnnnnnnnnnnnnnnnnnnnnnnnnnnnnnnnnnnnnnnnnnnnnnnnnnnnnnnnnnnnnnnnnnnnnnnnnnnnnnnnnnnnnnnnnnnnnnnnnnnnnnnnnnnnnnnnnnnnnnnnnnnnnnnnnnnnnnnnnnnnnnnnnnnnnnnnnnnnnnnnnnnnnnnnnnnnnnnnnnnnnnnnnnnnnnnnnnnnnnnnnnnnnnnnnnnnnnnnnnnnnnnnnnnnnnnnnnnnnnnnnnnnnnnnnnnnnnnnnnnnnnnnnnnnnnnnnnnnnnnnnnnnnnnnnnnnnnnnnnnnnnnnnnnnnnnnnnnnnnnnnnnnnnnnnnnnnnnnnnnnnnnnnnnnnnnnnnnnnnnnnnnnnnnnnnnnnnnnnnnnnnnnnnnnnnnnnnnnnnnnnnnnnnnnnnnnnnnnnnnnnnnnnnnnnnnnnnnnnnnnnnnnnnnnnnnnnnnnnnnnnnnnnnnnnnnnnnnnnnnnnnnnnnnnnnnnnnnnnnnnnnnnnnnnnnnnnnnnnnnnnnnnnnnnnnnnnnnnnnnnnnnnnnnnnnnnnnnnnnnnnnnnnnnnnnnnnnnnnnnnnnnnnnnnnnnnnnnnnnnnnnnnnnnnnnnnnnnnnnnnnnnnnnnnnnnnnnnnnnnnnnnnnnnnnnnnnnnnnnnnnnnnnnnnnnnnnnnnnnnnnnnnnnnnnnnnnnnnnnnnnnnnnnnnnnnnnnnnnnnnnnnnnnnnnnnnnnnnnnnnnnnnnnnnnnnnnnnnnnnnnnnnnnnnnnnnnnnnnnnnnnnnnnnnnnnnnnnnnnnnnnnnnnnnnnnnnnnnnnnnnnnnnnnnnnnnnnnnnnnnnnnnnnnnnnnnnnnnnnnnnnnnnnnnnnnnnnnnnnnnnnnnnnnnnnnnnnnnnnnnnnnnnnnnnnnnnnnnnnnnnnnnnnnnnnnnnnnnnnnnnnnnnnnnnnnnnnnnnnnnnnnnnnnnnnnnnnnnnnnnnnnnnnnnnnnnnnnnnnnnnnnnnnnnnnnnnnnnnnnnnnnnnnnnnnnnnnnnnnnnnnnnnnnnnnnnnnnnnnnnnnnnnnnnnnnnnnnnnnnnnnnnnnnnnnnnnnnnnnnnnnnnnnnnnnnnnnnnnnnnnnnnnnnnnnnnnnnnnnnnnnnnnnnnnnnnnnnnnnnnnnnnnnnnnnnnnnnnnnnnnnnnnnnnnnnnnnnnnnnnnnnnnnnnnnnnnnnnnnnnnnnnnnnnnnnnnnnnnnnnnnnnnnnnnnnnnnnnnnnnnnnnnnnnnnnnnnnnnnnnnnnnnnnnnnnnnnnnnnnnnnnnnnnnnnnnnnnnnnnnnnnnnnnnnnnnnnnnnnnnnnnnnnnnnnnnnnnnnnnnnnnnnnnnnnnnnnnnnnnnnnnnnnnnnnnnnnnnnnnnnnnnnnnnnnnnnnnnnnnnnnnnnnnnnnnnnnnnnnnnnnnnnnnnnnnnnnnnnnnnnnnnnnnnnnnnnnnnnnnnnnnnnnnnnnnnnnnnnnnnnnnnnnnnnnnnnnnnnnnnnnnnnnnnnnnnnnnnnnnnnnnnnnnnnnnnnnnnnnnnnnnnnnnnnnnnnnnnnnnnnnnnnnnnnnnnnnnnnnnnnnnnnnnnnnnnnnnnnnnnnnnnnnnnnnnnnnnnnnnnnnnnnnnnnnnnnnnnnnnnnnnnnnnnnnnnnnnnnnnnnnnnnnnnnnnnnnnnnnnnnnnnnnnnnnnnnnnnnnnnnnnnnnnnnnnnnnnnnnnnnnnnnnnnnnnnnnnnnnnnnnnnnnnnnnnnnnnnnnnnnnnnnnnnnnnnnnnnnnnnnnnnnnnnnnnnnnnnnnnnnnnnnnnnnnnnnnnnnnnnnnnnnnnnnnnnnnnnnnnnnnnnnnnnnnnnnnnnnnnnnnnnnnnnnnnnnnnnnnnnnnnnnnnnnnnnnnnnnnnnnnnnnnnnnnnnnnnnnnnnnnnnnnnnnnnnnnnnnnnnnnnnnnnnnnnnnnnnnnnnnnnnnnnnnnnnnnnnnnnnnnnnnnnnnnnnnnnnnnnnnnnnnnnnnnnnnnnnnnnnnnnnnnnnnnnnnnnnnnnnnnnnnnnnnnnnnnnnnnnnnnnnnnnnnnnnnnnnnnnnnnnnnnnnnnnnnnnnnnnnnnnnnnnnnnnnnnnnnnnnnnnnnnnnnnnnnnnnnnnnnnnnnnnnnnnnnnnnnnnnnnnnnnnnnnnnnnnnnnnnnnnnnnnnnnnnnnnnnnnnnnnnnnnnnnnnnnnnnnnnnnnnnnnnnnnnnnnnnnnnnnnnnnnnnnnnnnnnnnnnnnnnnnnnnnnnnnnnnnnnnnnnnnnnnnnnnnnnnnnnnnnnnnnnnnnnnnnnnnnnnnnnnnnnnnnnnnnnnnnnnnnnnnnnnnnnnnnnnnnnnnnnnnnnnnnnnnnnnnnnnnnnnnnnnnnnnnnnnnnnnnnnnnnnnnnnnnnnnnnnnnnnnnnnnnnnnnnnnnnnnnnnnnnnnnnnnnnnnnnnnnnnnnnnnnnnnnnnnnnnnnnnnnnnnnnnnnnnnnnnnnnnnnnnnnnnnnnnnnnnnnnnnnnnnnnnnnnnnnnnnnnnnnnnnnnnnnnnnnnnnnnnnnnnnnnnnnnnnnnnnnnnnnnnnnnnnnnnnnnnnnnnnnnnnnnnnnnnnnnnnnnnnnnnnnnnnnnnnnnnnnnnnnnnnnnnnnnnnnnnnnnnnnnnnnnnnnnnnnnnnnnnnnnnnnnnnnnnnnnnnnnnnnnnnnnnnnnnnnnnnnnnnnnnnnnnnnnnnnnnnnnnnnnnnnnnnnnnnnnnnnnnnnnnnnnnnnnnnnnnnnnnnnnnnnnnnnnnnnnnnnnnnnnnnnnnnnnnnnnnnnnnnnnnnnnnnnnnnnnnnnnnnnnnnnnnnnnnnnnnnnnnnnnnnnnnnnnnnnnnnnnnnnnnnnnnnnnnnnnnnnnnnnnnnnnnnnnnnnnnnnnnnnnnnnnnnnnnnnnnnnnnnnnnnnnnnnnnnnnnnnnnnnnnnnnnnnnnnnnnnnnnnnnnnnnnnnnnnnnnnnnnnnnnnnnnnnnnnnnnnnnnnnnnnnnnnnnnnnnnnnnnnnnnnnnnnnnnnnnnnnnnnnnnnnnnnnnnnnnnnnnnnnnnnnnnnnnnnnnnnnnnnnnnnnnnnnnnnnnnnnnnnnnnnnnnnnnnnnnnnnnnnnnnnnnnnnnnnnnnnnnnnnnnnnnnnnnnnnnnnnnnnnnnnnnnnnnnnnnnnnnnnnnnnnnnnnnnnnnnnnnnnnnnnnnnnnnnnnnnnnnnnnnnnnnnnnnnnnnnnnnnnnnnnnnnnnnnnnnnnnnnnnnnnnnnnnnnnnnnnnnnnnnnnnnnnnnnnnnnnnnnnnnnnnnnnnnnnnnnnnnnnnnnnnnnnnnnnnnnnnnnnnnnnnnnnnnnnnnnnnnnnnnnnnnnnnnnnnnnnnnnnnnnnnnnnnnnnnnnnnnnnnnnnnnnnnnnnnnnnnnnnnnnnnnnnnnnnnnnnnnnnnnnnnnnnnnnnnnnnnnnnnnnnnnnnnnnnnnnnnnnnnnnnnnnnnnnnnnnnnnnnnnnnnnnnnnnnnnnnnnnnnnnnnnnnnnnnnnnnnnnnnnnnnnnnnnnnnnnnnnnnnnnnnnnnnnnnnnnnnnnnnnnnnnnnnnnnnnnnnnnnnnnnnnnnnnnnnnnnnnnnnnnnnnnnnnnnnnnnnnnnnnnnnnnnnnnnnnnnnnnnnnnnnnnnnnnnnnnnnnnnnnnnnnnnnnnnnnnnnnnnnnnnnnnnnnnnnnnnnnnnnnnnnnnnnnnnnnnnnnnnnnnnnnnnnnnnnnnnnnnnnnnnnnnnnnnnnnnnnnnnnnnnnnnnnnnnnnnnnnnnnnnnnnnnnnnnnnnnnnnnnnnnnnnnnnnnnnnnnnnnnnnnnnnnnnnnnnnnnnnnnnnnnnnnnnnnnnnnnnnnnnnnnnnnnnnnnnnnnnnnnnnnnnnnnnnnnnnnnnnnnnnnnnnnnnnnnnnnnnnnnnnnnnnnnnnnnnnnnnnnnnnnnnnnnnnnnnnnnnnnnnnnnnnnnnnnnnnnnnnnnnnnnnnnnnnnnnnnnnnnnnnnnnnnnnnnnnnnnnnnnnnnnnnnnnnnnnnnnnnnnnnnnnnnnnnnnnnnnnnnnnnnnnnnnnnnnnnnnnnnnnnnnnnnnnnnnnnnnnnnnnnnnnnnnnnnnnnnnnnnnnnnnnnnnnnnnnnnnnnnnnnnnnnnnnnnnnnnnnnnnnnnnnnnnnnnnnnnnnnnnnnnnnnnnnnnnnnnnnnnnnnnnnnnnnnnnnnnnnnnnnnnnnnnnnnnnnnnnnnnnnnnnnnnnnnnnnnnnnnnnnnnnnnnnnnnnnnnnnnnnnnnnnnnnnnnnnnnnnnnnnnnnnnnnnnnnnnnnnnnnnnnnnnnnnnnnnnnnnnnnnnnnnnnnnnnnnnnnnnnnnnnnnnnnnnnnnnnnnnnnnnnnnnnnnnnnnnnnnnnnnnnnnnnnnnnnnnnnnnnnnnnnnnnnnnnnnnnnnnnnnnnnnnnnnnnnnnnnnnnnnnnnnnnnnnnnnnnnnnnnnnnnnnnnnnnnnnnnnnnnnnnnnnnnnnnnnnnnnnnnnnnnnnnnnnnnnnnnnnnnnnnnnnnnnnnnnnnnnnnnnnnnnnnnnnnnnnnnnnnnnnnnnnnnnnnnnnnnnnnnnnnnnnnnnnnnnnnnnnnnnnnnnnnnnnnnnnnnnnnnnnnnnnnnnnnnnnnnnnnnnnnnnnnnnnnnnnnnnnnnnnnnnnnnnnnnnnnnnnnnnnnnnnnnnnnnnnnnnnnnnnnnnnnnnnnnnnnnnnnnnnnnnnnnnnnnnnnnnnnnnnnnnnnnnnnnnnnnnnnnnnnnnnnnnnnnnnnnnnnnnnnnnnnnnnnnnnnnnnnnnnnnnnnnnnnnnnnnnnnnnnnnnnnnnnnnnnnnnnnnnnnnnnnnnnnnnnnnnnnnnnnnnnnnnnnnnnnnnnnnnnnnnnnnnnnnnnnnnnnnnnnnnnnnnnnnnnnnnnnnnnnnnnnnnnnnnnnnnnnnnnnnnnnnnnnnnnnnnnnnnnnnnnnnnnnnnnnnnnnnnnnnnnnnnnnnnnnnnnnnnnnnnnnnnnnnnnnnnnnnnnnnnnnnnnnnnnnnnnnnnnnnnnnnnnnnnnnnnnnnnnnnnnnnnnnnnnnnnnnnnnnnnnnnnnnnnnnnnnnnnnnnnnnnnnnnnnnnnnnnnnnnnnnnnnnnnnnnnnnnnnnnnnnnnnnnnnnnnnnnnnnnnnnnnnnnnnnnnnnnnnnnnnnnnnnnnnnnnnnnnnnnnnnnnnnnnnnnnnnnnnnnnnnnnnnnnnnnnnnnnnnnnnnnnnnnnnnnnnnnnnnnnnnnnnnnnnnnnnnnnnnnnnnnnnnnnnnnnnnnnnnnnnnnnnnnnnnnnnnnnnnnnnnnnnnnnnnnnnnnnnnnnnnnnnnnnnnnnnnnnnnnnnnnnnnnnnnnnnnnnnnnnnnnnnnnnnnnnnnnnnnnnnnnnnnnnnnnnnnnnnnnnnnnnnnnnnnnnnnnnnnnnnnnnnnnnnnnnnnnnnnnnnnnnnnnnnnnnnnnnnnnnnnnnnnnnnnnnnnnnnnnnnnnnnnnnnnnnnnnnnnnnnnnnnnnnnnnnnnnnnnnnnnnnnnnnnnnnnnnnnnnnnnnnnnnnnnnnnnnnnnnnnnnnnnnnnnnnnnnnnnnnnnnnnnnnnnnnnnnnnnnnnnnnnnnnnnnnnnnnnnnnnnnnnnnnnnnnnnnnnnnnnnnnnnnnnnnnnnnnnnnnnnnnnnnnnnnnnnnnnnnnnnnnnnnnnnnnnnnnnnnnnnnnnnnnnnnnnnnnnnnnnnnnnnnnnnnnnnnnnnnnnnnnnnnnnnnnnnnnnnnnnnnnnnnnnnnnnnnnnnnnnnnnnnnnnnnnnnnnnnnnnnnnnnnnnnnnnnnnnnnnnnnnnnnnnnnnnnnnnnnnnnnnnnnnnnnnnnnnnnnnnnnnnnnnnnnnnnnnnnnnnnnnnnnnnnnnnnnnnnnnnnnnnnnnnnnnnnnnnnnnnnnnnnnnnnnnnnnnnnnnnnnnnnnnnnnnnnnnnnnnnnnnnnnnnnnnnnnnnnnnnnnnnnnnnnnnnnnnnnnnnnnnnnnnnnnnnnnnnnnnnnnnnnnnnnnnnnnnnnnnnnnnnnnnnnnnnnnnnnnnnnnnnnnnnnnnnnnnnnnnnnnnnnnnnnnnnnnnnnnnnnnnnnnnnnnnnnnnnnnnnnnnnnnnnnnnnnnnnnnnnnnnnnnnnnnnnnnnnnnnnnnnnnnnnnnnnnnnnnnnnnnnnnnnnnnnnnnnnnnnnnnnnnnnnnnnnnnnnnnnnnnnnnnnnnnnnnnnnnnnnnnnnnnnnnnnnnnnnnnnnnnnnnnnnnnnnnnnnnnnnnnnnnnnnnnnnnnnnnnnnnnnnnnnnnnnnnnnnnnnnnnnnnnnnnnnnnnnnnnnnnnnnnnnnnnnnnnnnnnnnnnnnnnnnnnnnnnnnnnnnnnnnnnnnnnnnnnnnnnnnnnnnnnnnnnnnnnnnnnnnnnnnnnnnnnnnnnnnnnnnnnnnnnnnnnnnnnnnnnnnnnnnnnnnnnnnnnnnnnnnnnnnnnnnnnnnnnnnnnnnnnnnnnnnnnnnnnnnnnnnnnnnnnnnnnnnnnnnnnnnnnnnnnnnnnnnnnnnnnnnnnnnnnnnnnnnnnnnnnnnnnnnnnnnnnnnnnnnnnnnnnnnnnnnnnnnnnnnnnnnnnnnnnnnnnnnnnnnnnnnnnnnnnnnnnnnnnnnnnnnnnnnnnnnnnnnnnnnnnnnnnnnnnnnnnnnnnnnnnnnnnnnnnnnnnnnnnnnnnnnnnnnnnnnnnnnnnnnnnnnnnnnnnnnnnnnnnnnnnnnnnnnnnnnnnnnnnnnnnnnnnnnnnnnnnnnnnnnnnnnnnnnnnnnnnnnnnnnnnnnnnnnnnnnnnnnnnnnnnnnnnnnnnnnnnnnnnnnnnnnnnnnnnnnnnnnnnnnnnnnnnnnnnnnnnnnnnnnnnnnnnnnnnnnnnnnnnnnnnnnnnnnnnnnnnnnnnnnnnnnnnnnnnnnnnnnnnnnnnnnnnnnnnnnnnnnnnnnnnnnnnnnnnnnnnnnnnnnnnnnnnnnnnnnnnnnnnnnnnnnnnnnnnnnnnnnnnnnnnnnnnnnnnnnnnnnnnnnnnnnnnnnnnnnnnnnnnnnnnnnnnnnnnnnnnnnnnnnnnnnnnnnnnnnnnnnnnnnnnnnnnnnnnnnnnnnnnnnnnnnnnnnnnnnnnnnnnnnnnnnnnnnnnnnnnnnnnnnnnnnnnnnnnnnnnnnnnnnnnnnnnnnnnnnnnnnnnnnnnnnnnnnnnnnnnnnnnnnnnnnnnnnnnnnnnnnnnnnnnnnnnnnnnnnnnnnnnnnnnnnnnnnnnnnnnnnnnnnnnnnnnnnnnnnnnnnnnnnnnnnnnnnnnnnnnnnnnnnnnnnnnnnnnnnnnnnnnnnnnnnnnnnnnnnnnnnnnnnnnnnnnnnnnnnnnnnnnnnnnnnnnnnnnnnnnnnnnnnnnnnnnnnnnnnnnnnnnnnnnnnnnnnnnnnnnnnnnnnnnnnnnnnnnnnnnnnnnnnnnnnnnnnnnnnnnnnnnnnnnnnnnnnnnnnnnnnnnnnnnnnnnnnnnnnnnnnnnnnnnnnnnnnnnnnnnnnnnnnnnnnnnnnnnnnnnnnnnnnnnnnnnnnnnnnnnnnnnnnnnnnnnnnnnnnnnnnnnnnnnnnnnnnnnnnnnnnnnnnnnnnnnnnnnnnnnnnnnnnnnnnnnnnnnnnnnnnnnnnnnnnnnnnnnnnnnnnnnnnnnnnnnnnnnnnnnnnnnnnnnnnnnnnnnnnnnnnnnnnnnnnnnnnnnnnnnnnnnnnnnnnnnnnnnnnnnnnnnnnnnnnnnnnnnnnnnnnnnnnnnnnnnnnnnnnnnnnnnnnnnnnnnnnnnnnnnnnnnnnnnnnnnnnnnnnnnnnnnnnnnnnnnnnnnnnnnnnnnnnnnnnnnnnnnnnnnnnnnnnnnnnnnnnnnnnnnnnnnnnnnnnnnnnnnnnnnnnnnnnnnnnnnnnnnnnnnnnnnnnnnnnnnnnnnnnnnnnnnnnnnnnnnnnnnnnnnnnnnnnnnnnnnnnnnnnnnnnnnnnnnnnnnnnnnnnnnnnnnnnnnnnnnnnnnnnnnnnnnnnnnnnnnnnnnnnnnnnnnnnnnnnnnnnnnnnnnnnnnnnnnnnnnnnnnnnnnnnnnnnnnnnnnnnnnnnnnnnnnnnnnnnnnnnnnnnnnnnnnnnnnnnnnnnnnnnnnnnnnnnnnnnnnnnnnnnnnnnnnnnnnnnnnnnnnnnnnnnnnnnnnnnnnnnnnnnnnnnnnnnnnnnnnnnnnnnnnnnnnnnnnnnnnnnnnnnnnnnnnnnnnnnnnnnnnnnnnnnnnnnnnnnnnnnnnnnnnnnnnnnnnnnnnnnnnnnnnnnnnnnnnnnnnnnnnnnnnnnnnnnnnnnnnnnnnnnnnnnnnnnnnnnnnnnnnnnnnnnnnnnnnnnnnnnnnnnnnnnnnnnnnnnnnnnnnnnnnnnnnnnnnnnnnnnnnnnnnnnnnnnnnnnnnnnnnnnnnnnnnnnnnnnnnnnnnnnnnnnnnnnnnnnnnnnnnnnnnnnnnnnnnnnnnnnnnnnnnnnnnnnnnnnnnnnnnnnnnnnnnnnnnnnnnnnnnnnnnnnnnnnnnnnnnnnnnnnnnnnnnnnnnnnnnnnnnnnnnnnnnnnnnnnnnnnnnnnnnnnnnnnnnnnnnnnnnnnnnnnnnnnnnnnnnnnnnnnnnnnnnnnnnnnnnnnnnnnnnnnnnnnnnnnnnnnnnnnnnnnnnnnnnnnnnnnnnnnnnnnnnnnnnnnnnnnnnnnnnnnnnnnnnnnnnnnnnnnnnnnnnnnnnnnnnnnnnnnnnnnnnnnnnnnnnnnnnnnnnnnnnnnnnnnnnnnnnnnnnnnnnnnnnnnnnnnnnnnnnnnnnnnnnnnnnnnnnnnnnnnnnnnnnnnnnnnnnnnnnnnnnnnnnnnnnnnnnnnnnnnnnnnnnnnnnnnnnnnnnnnnnnnnnnnnnnnnnnnnnnnnnnnnnnnnnnnnnnnnnnnnnnnnnnnnnnnnnnnnnnnnnnnnnnnnnnnnnnnnnnnnnnnnnnnnnnnnnnnnnnnnnnnnnnnnnnnnnnnnnnnnnnnnnnnnnnnnnnnnnnnnnnnnnnnnnnnnnnnnnnnnnnnnnnnnnnnnnnnnnnnnnnnnnnnnnnnnnnnnnnnnnnnnnnnnnnnnnnnnnnnnnnnnnnnnnnnnnnnnnnnnnnnnnnnnnnnnnnnnnnnnnnnnnnnnnnnnnnnnnnnnnnnnnnnnnnnnnnnnnnnnnnnnnnnnnnnnnnnnnnnnnnnnnnnnnnnnnnnnnnnnnnnnnnnnnnnnnnnnnnnnnnnnnnnnnnnnnnnnnnnnnnnnnnnnnnnnnnnnnnnnnnnnnnnnnnnnnnnnnnnnnnnnnnnnnnnnnnnnnnnnnnnnnnnnnnnnnnnnnnnnnnnnnnnnnnnnnnnnnnnnnnnnnnnnnnnnnnnnnnnnnnnnnnnnnnnnnnnnnnnnnnnnnnnnnnnnnnnnnnnnnnnnnnnnnnnnnnnnnnnnnnnnnnnnnnnnnnnnnnnnnnnnnnnnnnnnnnnnnnnnnnnnnnnnnnnnnnnnnnnnnnnnnnnnnnnnnnnnnnnnnnnnnnnnnnnnnnnnnnnnnnnnnnnnnnnnnnnnnnnnnnnnnnnnnnnnnnnnnnnnnnnnnnnnnnnnnnnnnnnnnnnnnnnnnnnnnnnnnnnnnnnnnnnnnnnnnnnnnnnnnnnnnnnnnnnnnnnnnnnnnnnnnnnnnnnnnnnnnnnnnnnnnnnnnnnnnnnnnnnnnnnnnnnnnnnnnnnnnnnnnnnnnnnnnnnnnnnnnnnnnnnnnnnnnnnnnnnnnnnnnnnnnnnnnnnnnnnnnnnnnnnnnnnnnnnnnnnnnnnnnnnnnnnnnnnnnnnnnnnnnnnnnnnnnnnnnnnnnnnnnnnnnnnnnnnnnnnnnnnnnnnnnnnnnnnnnnnnnnnnnnnnnnnnnnnnnnnnnnnnnnnnnnnnnnnnnnnnnnnnnnnnnnnnnnnnnnnnnnnnnnnnnnnnnnnnnnnnnnnnnnnnnnnnnnnnnnnnnnnnnnnnnnnnnnnnnnnnnnnnnnnnnnnnnnnnnnnnnnnnnnnnnnnnnnnnnnnnnnnnnnnnnnnnnnnnnnnnnnnnnnnnnnnnnnnnnnnnnnnnnnnnnnnnnnnnnnnnnnnnnnnnnnnnnnnnnnnnnnnnnnnnnnnnnnnnnnnnnnnnnnnnnnnnnnnnnnnnnnnnnnnnnnnnnnnnnnnnnnnnnnnnnnnnnnnnnnnnnnnnnnnnnnnnnnnnnnnnnnnnnnnnnnnnnnnnnnnnnnnnnnnnnnnnnnnnnnnnnnnnnnnnnnnnnnnnnnnnnnnnnnnnnnnnnnnnnnnnnnnnnnnnnnnnnnnnnnnnnnnnnnnnnnnnnnnnnnnnnnnnnnnnnnnnnnnnnnnnnnnnnnnnnnnnnnnnnnnnnnnnnnnnnnnnnnnnnnnnnnnnnnnnnnnnnnnnnnnnnnnnnnnnnnnnnnnnnnnnnnnnnnnnnnnnnnnnnnnnnnnnnnnnnnnnnnnnnnnnnnnnnnnnnnnnnnnnnnnnnnnnnnnnnnnnnnnnnnnnnnnnnnnnnnnnnnnnnnnnnnnnnnnnnnnnnnnnnnnnnnnnnnnnnnnnnnnnnnnnnnnnnnnnnnnnnnnnnnnnnnnnnnnnnnnnnnnnnnnnnnnnnnnnnnnnnnnnnnnnnnnnnnnnnnnnnnnnnnnnnnnnnnnnnnnnnnnnnnnnnnnnnnnnnnnnnnnnnnnnnnnnnnnnnnnnnnnnnnnnnnnnnnnnnnnnnnnnnnnnnnnnnnnnnnnnnnnnnnnnnnnnnnnnnnnnnnnnnnnnnnnnnnnnnnnnnnnnnnnnnnnnnnnnnnnnnnnnnnnnnnnnnnnnnnnnnnnnnnnnnnnnnnnnnnnnnnnnnnnnnnnnnnnnnnnnnnnnnnnnnnnnnnnnnnnnnnnnnnnnnnnnnnnnnnnnnnnnnnnnnnnnnnnnnnnnnnnnnnnnnnnnnnnnnnnnnnnnnnnnnnnnnnnnnnnnnnnnnnnnnnnnnnnnnnnnnnnnnnnnnnnnnnnnnnnnnnnnnnnnnnnnnnnnnnnnnnnnnnnnnnnnnnnnnnnnnnnnnnnnnnnnnnnnnnnnnnnnnnnnnnnnnnnnnnnnnnnnnnnnnnnnnnnnnnnnnnnnnnnnnnnnnnnnnnnnnnnnnnnnnnnnnnnnnnnnnnnnnnnnnnnnnnnnnnnnnnnnnnnnnnnnnnnnnnnnnnnnnnnnnnnnnnnnnnnnnnnnnnnnnnnnnnnnnnnnnnnnnnnnnnnnnnnnnnnnnnnnnnnnnnnnnnnnnnnnnnnnnnnnnnnnnnnnnnnnnnnnnnnnnnnnnnnnnnnnnnnnnnnnnnnnnnnnnnnnnnnnnnnnnnnnnnnnnnnnnnnnnnnnnnnnnnnnnnnnnnnnnnnnnnnnnnnnnnnnnnnnnnnnnnnnnnnnnnnnnnnnnnnnnnnnnnnnnnnnnnnnnnnnnnnnnnnnnnnnnnnnnnnnnnnnnnnnnnnnnnnnnnnnnnnnnnnnnnnnnnnnnnnnnnnnnnnnnnnnnnnnnnnnnnnnnnnnnnnnnnnnnnnnnnnnnnnnnnnnnnnnnnnnnnnnnnnnnnnnnnnnnnnnnnnnnnnnnnnnnnnnnnnnnnnnnnnnnnnnnnnnnnnnnnnnnnnnnnnnnnnnnnnnnnnnnnnnnnnnnnnnnnnnnnnnnnnnnnnnnnnnnnnnnnnnnnnnnnnnnnnnnnnnnnnnnnnnnnnnnnnnnnnnnnnnnnnnnnnnnnnnnnnnnnnnnnnnnnnnnnnnnnnnnnnnnnnnnnnnnnnnnnnnnnnnnnnnnnnnnnnnnnnnnnnnnnnnnnnnnnnnnnnnnnnnnnnnnnnnnnnnnnnnnnnnnnnnnnnnnnnnnnnnnnnnnnnnnnnnnnnnnnnnnnnnnnnnnnnnnnnnnnnnnnnnnnnnnnnnnnnnnnnnnnnnnnnnnnnnnnnnnnnnnnnnnnnnnnnnnnnnnnnnnnnnnnnnnnnnnnnnnnnnnnnnnnnnnnnnnnnnnnnnnnnnnnnnnnnnnnnnnnnnnnnnnnnnnnnnnnnnnnnnnnnnnnnnnnnnnnnnnnnnnnnnnnnnnnnnnnnnnnnnnnnnnnnnnnnnnnnnnnnnnnnnnnnnnnnnnnnnnnnnnnnnnnnnnnnnnnnnnnnnnnnnnnnnnnnnnnnnnnnnnnnnnnnnnnnnnnnnnnnnnnnnnnnnnnnnnnnnnnnnnnnnnnnnnnnnnnnnnnnnnnnnnnnnnnnnnnnnnnnnnnnnnnnnnnnnnnnnnnnnnnnnnnnnnnnnnnnnnnnnnnnnnnnnnnnnnnnnnnnnnnnnnnnnnnnnnnnnnnnnnnnnnnnnnnnnnnnnnnnnnnnnnnnnnnnnnnnnnnnnnnnnnnnnnnnnnnnnnnnnnnnnnnnnnnnnnnnnnnnnnnnnnnnnnnnnnnnnnnnnnnnnnnnnnnnnnnnnnnnnnnnnnnnnnnnnnnnnnnnnnnnnnnnnnnnnnnnnnnnnnnnnnnnnnnnnnnnnnnnnnnnnnnnnnnnnnnnnnnnnnnnnnnnnnnnnnnnnnnnnnnnnnnnnnnnnnnnnnnnnnnnnnnnnnnnnnnnnnnnnnnnnnnnnnnnnnnnnnnnnnnnnnnnnnnnnnnnnnnnnnnnnnnnnnnnnnnnnnnnnnnnnnnnnnnnnnnnnnnnnnnnnnnnnnnnnnnnnnnnnnnnnnnnnnnnnnnnnnnnnnnnnnnnnnnnnnnnnnnnnnnnnnnnnnnnnnnnnnnnnnnnnnnnnnnnnnnnnnnnnnnnnnnnnnnnnnnnnnnnnnnnnnnnnnnnnnnnnnnnnnnnnnnnnnnnnnnnnnnnnnnnnnnnnnnnnnnnnnnnnnnnnnnnnnnnnnnnnnnnnnnnnnnnnnnnnnnnnnnnnnnnnnnnnnnnnnnnnnnnnnnnnnnnnnnnnnnnnnnnnnnnnnnnnnnnnnnnnnnnnnnnnnnnnnnnnnnnnnnnnnnnnnnnnnnnnnnnnnnnnnnnnnnnnnnnnnnnnnnnnnnnnnnnnnnnnnnnnnnnnnnnnnnnnnnnnnnnnnnnnnnnnnnnnnnnnnnnnnnnnnnnnnnnnnnnnnnnnnnnnnnnnnnnnnnnnnnnnnnnnnnnnnnnnnnnnnnnnnnnnnnnnnnnnnnnnnnnnnnnnnnnnnnnnnnnnnnnnnnnnnnnnnnnnnnnnnnnnnnnnnnnnnnnnnnnnnnnnnnnnnnnnnnnnnnnnnnnnnnnnnnnnnnnnnnnnnnnnnnnnnnnnnnnnnnnnnnnnnnnnnnnnnnnnnnnnnnnnnnnnnnnnnnnnnnnnnnnnnnnnnnnnnnnnnnnnnnnnnnnnnnnnnnnnnnnnnnnnnnnnnnnnnnnnnnnnnnnnnnnnnnnnnnnnnnnnnnnnnnnnnnnnnnnnnnnnnnnnnnnnnnnnnnnnnnnnnnnnnnnnnnnnnnnnnnnnnnnnnnnnnnnnnnnnnnnnnnnnnnnnnnnnnnnnnnnnnnnnnnnnnnnnnnnnnnnnnnnnnnnnnnnnnnnnnnnnnnnnnnnnnnnnnnnnnnnnnnnnnnnnnnnnnnnnnnnnnnnnnnnnnnnnnnnnnnnnnnnnnnnnnnnnnnnnnnnnnnnnnnnnnnnnnnnnnnnnnnnnnnnnnnnnnnnnnnnnnnnnnnnnnnnnnnnnnnnnnnnnnnnnnnnnnnnnnnnnnnnnnnnnnnnnnnnnnnnnnnnnnnnnnnnnnnnnnnnnnnnnnnnnnnnnnnnnnnnnnnnnnnnnnnnnnnnnnnnnnnnnnnnnnnnnnnnnnnnnnnnnnnnnnnnnnnnnnnnnnnnnnnnnnnnnnnnnnnnnnnnnnnnnnnnnnnnnnnnnnnnnnnnnnnnnnnnnnnnnnnnnnnnnnnnnnnnnnnnnnnnnnnnnnnnnnnnnnnnnnnnnnnnnnnnnnnnnnnnnnnnnnnnnnnnnnnnnnnnnnnnnnnnnnnnnnnnnnnnnnnnnnnnnnnnnnnnnnnnnnnnnnnnnnnnnnnnnnnnnnnnnnnnnnnnnnnnnnnnnnnnnnnnnnnnnnnnnnnnnnnnnnnnnnnnnnnnnnnnnnnnnnnnnnnnnnnnnnnnnnnnnnnnnnnnnnnnnnnnnnnnnnnnnnnnnnnnnnnnnnnnnnnnnnnnnnnnnnnnnnnnnnnnnnnnnnnnnnnnnnnnnnnnnnnnnnnnnnnnnnnnnnnnnnnnnnnnnnnnnnnnnnnnnnnnnnnnnnnnnnnnnnnnnnnnnnnnnnnnnnnnnnnnnnnnnnnnnnnnnnnnnnnnnnnnnnnnnnnnnnnnnnnnnnnnnnnnnnnnnnnnnnnnnnnnnnnnnnnnnnnnnnnnnnnnnnnnnnnnnnnnnnnnnnnnnnnnnnnnnnnnnnnnnnnnnnnnnnnnnnnnnnnnnnnnnnnnnnnnnnnnnnnnnnnnnnnnnnnnnnnnnnnnnnnnnnnnnnnnnnnnnnnnnnnnnnnnnnnnnnnnnnnnnnnnnnnnnnnnnnnnnnnnnnnnnnnnnnnnnnnnnnnnnnnnnnnnnnnnnnnnnnnnnnnnnnnnnnnnnnnnnnnnnnnnnnnnnnnnnnnnnnnnnnnnnnnnnnnnnnnnnnnnnnnnnnnnnnnnnnnnnnnnnnnnnnnnnnnnnnnnnnnnnnnnnnnnnnnnnnnnnnnnnnnnnnnnnnnnnnnnnnnnnnnnnnnnnnnnnnnnnnnnnnnnnnnnnnnnnnnnnnnnnnnnnnnnnnnnnnnnnnnnnnnnnnnnnnnnnnnnnnnnnnnnnnnnnnnnnnnnnnnnnnnnnnnnnnnnnnnnnnnnnnnnnnnnnnnnnnnnnnnnnnnnnnnnnnnnnnnnnnnnnnnnnnnnnnnnnnnnnnnnnnnnnnnnnnnnnnnnnnnnnnnnnnnnnnnnnnnnnnnnnnnnnnnnnnnnnnnnnnnnnnnnnnnnnnnnnnnnnnnnnnnnnnnnnnnnnnnnnnnnnnnnnnnnnnnnnnnnnnnnnnnnnnnnnnnnnnnnnnnnnnnnnnnnnnnnnnnnnnnnnnnnnnnnnnnnnnnnnnnnnnnnnnnnnnnnnnnnnnnnnnnnnnnnnnnnnnnnnnnnnnnnnnnnnnnnnnnnnnnnnnnnnnnnnnnnnnnnnnnnnnnnnnnnnnnnnnnnnnnnnnnnnnnnnnnnnnnnnnnnnnnnnnnnnnnnnnnnnnnnnnnnnnnnnnnnnnnnnnnnnnnnnnnnnnnnnnnnnnnnnnnnnnnnnnnnnnnnnnnnnnnnnnnnnnnnnnnnnnnnnnnnnnnnnnnnnnnnnnnnnnnnnnnnnnnnnnnnnnnnnnnnnnnnnnnnnnnnnnnnnnnnnnnnnnnnnnnnnnnnnnnnnnnnnnnnnnnnnnnnnnnnnnnnnnnnnnnnnnnnnnnnnnnnnnnnnnnnnnnnnnnnnnnnnnnnnnnnnnnnnnnnnnnnnnnnnnnnnnnnnnnnnnnnnnnnnnnnnnnnnnnnnnnnnnnnnnnnnnnnnnnnnnnnnnnnnnnnnnnnnnnnnnnnnnnnnnnnnnnnnnnnnnnnnnnnnnnnnnnnnnnnnnnnnnnnnnnnnnnnnnnnnnnnnnnnnnnnnnnnnnnnnnnnnnnnnnnnnnnnnnnnnnnnnnnnnnnnnnnnnnnnnnnnnnnnnnnnnnnnnnnnnnnnnnnnnnnnnnnnnnnnnnnnnnnnnnnnnnnnnnnnnnnnnnnnnnnnnnnnnnnnnnnnnnnnnnnnnnnnnnnnnnnnnnnnnnnnnnnnnnnnnnnnnnnnnnnnnnnnnnnnnnnnnnnnnnnnnnnnnnnnnnnnnnnnnnnnnnnnnnnnnnnnnnnnnnnnnnnnnnnnnnnnnnnnnnnnnnnnnnnnnnnnnnnnnnnnnnnnnnnnnnnnnnnnnnnnnnnnnnnnnnnnnnnnnnnnnnnnnnnnnnnnnnnnnnnnnnnnnnnnnnnnnnnnnnnnnnnnnnnnnnnnnnnnnnnnnnnnnnnnnnnnnnnnnnnnnnnnnnnnnnnnnnnnnnnnnnnnnnnnnnnnnnnnnnnnnnnnnnnnnnnnnnnnnnnnnnnnnnnnnnnnnnnnnnnnnnnnnnnnnnnnnnnnnnnnnnnnnnnnnnnnnnnnnnnnnnnnnnnnnnnnnnnnnnnnnnnnnnnnnnnnnnnnnnnnnnnnnnnnnnnnnnnnnnnnnnnnnnnnnnnnnnnnnnnnnnnnnnnnnnnnnnnnnnnnnnnnnnnnnnnnnnnnnnnnnnnnnnnnnnnnnnnnnnnnnnnnnnnnnnnnnnnnnnnnnnnnnnnnnnnnnnnnnnnnnnnnnnnnnnnnnnnnnnnnnnnnnnnnnnnnnnnnnnnnnnnnnnnnnnnnnnnnnnnnnnnnnnnnnnnnnnnnnnnnnnnnnnnnnnnnnnnnnnnnnnnnnnnnnnnnnnnnnnnnnnnnnnnnnnnnnnnnnnnnnnnnnnnnnnnnnnnnnnnnnnnnnnnnnnnnnnnnnnnnnnnnnnnnnnnnnnnnnnnnnnnnnnnnnnnnnnnnnnnnnnnnnnnnnnnnnnnnnnnnnnnnnnnnnnnnnnnnnnnnnnnnnnnnnnnnnnnnnnnnnnnnnnnnnnnnnnnnnnnnnnnnnnnnnnnnnnnnnnnnnnnnnnnnnnnnnnnnnnnnnnnnnnnnnnnnnnnnnnnnnnnnnnnnnnnnnnnnnnnnnnnnnnnnnnnnnnnnnnnnnnnnnnnnnnnnnnnnnnnnnnnnnnnnnnnnnnnnnnnnnnnnnnnnnnnnnnnnnnnnnnnnnnnnnnnnnnnnnnnnnnnnnnnnnnnnnnnnnnnnnnnnnnnnnnnnnnnnnnnnnnnnnnnnnnnnnnnnnnnnnnnnnnnnnnnnnnnnnnnnnnnnnnnnnnnnnnnnnnnnnnnnnnnnnnnnnnnnnnnnnnnnnnnnnnnnnnnnnnnnnnnnnnnnnnnnnnnnnnnnnnnnnnnnnnnnnnnnnnnnnnnnnnnnnnnnnnnnnnnnnnnnnnnnnnnnnnnnnnnnnnnnnnnnnnnnnnnnnnnnnnnnnnnnnnnnnnnnnnnnnnnnnnnnnnnnnnnnnnnnnnnnnnnnnnnnnnnnnnnnnnnnnnnnnnnnnnnnnnnnnnnnnnnnnnnnnnnnnnnnnnnnnnnnnnnnnnnnnnnnnnnnnnnnnnnnnnnnnnnnnnnnnnnnnnnnnnnnnnnnnnnnnnnnnnnnnnnnnnnnnnnnnnnnnnnnnnnnnnnnnnnnnnnnnnnnnnnnnnnnnnnnnnnnnnnnnnnnnnnnnnnnnnnnnnnnnnnnnnnnnnnnnnnnnnnnnnnnnnnnnnnnnnnnnnnnnnnnnnnnnnnnnnnnnnnnnnnnnnnnnnnnnnnnnnnnnnnnnnnnnnnnnnnnnnnnnnnnnnnnnnnnnnnnnnnnnnnnnnnnnnnnnnnnnnnnnnnnnnnnnnnnnnnnnnnnnnnnnnnnnnnnnnnnnnnnnnnnnnnnnnnnnnnnnnnnnnnnnnnnnnnnnnnnnnnnnnnnnnnnnnnnnnnnnnnnnnnnnnnnnnnnnnnnnnnnnnnnnnnnnnnnnnnnnnnnnnnnnnnnnnnnnnnnnnnnnnnnnnnnnnnnnnnnnnnnnnnnnnnnnnnnnnnnnnnnnnnnnnnnnnnnnnnnnnnnnnnnnnnnnnnnnnnnnnnnnnnnnnnnnnnnnnnnnnnnnnnnnnnnnnnnnnnnnnnnnnnnnnnnnnnnnnnnnnnnnnnnnnnnnnnnnnnnnnnnnnnnnnnnnnnnnnnnnnnnnnnnnnnnnnnnnnnnnnnnnnnnnnnnnnnnnnnnnnnnnnnnnnnnnnnnnnnnnnnnnnnnnnnnnnnnnnnnnnnnnnnnnnnnnnnnnnnnnnnnnnnnnnnnnnnnnnnnnnnnnnnnnnnnnnnnnnnnnnnnnnnnnnnnnnnnnnnnnnnnnnnnnnnnnnnnnnnnnnnnnnnnnnnnnnnnnnnnnnnnnnnnnnnnnnnnnnnnnnnnnnnnnnnnnnnnnnnnnnnnnnnnnnnnnnnnnnnnnnnnnnnnnnnnnnnnnnnnnnnnnnnnnnnnnnnnnnnnnnnnnnnnnnnnnnnnnnnnnnnnnnnnnnnnnnnnnnnnnnnnnnnnnnnnnnnnnnnnnnnnnnnnnnnnnnnnnnnnnnnnnnnnnnnnnnnnnnnnnnnnnnnnnnnnnnnnnnnnnnnnnnnnnnnnnnnnnnnnnnnnnnnnnnnnnnnnnnnnnnnnnnnnnnnnnnnnnnnnnnnnnnnnnnnnnnnnnnnnnnnnnnnnnnnnnnnnnnnnnnnnnnnnnnnnnnnnnnnnnnnnnnnnnnnnnnnnnnnnnnnnnnnnnnnnnnnnnnnnnnnnnnnnnnnnnnnnnnnnnnnnnnnnnnnnnnnnnnnnnnnnnnnnnnnnnnnnnnnnnnnnnnnnnnnnnnnnnnnnnnnnnnnnnnnnnnnnnnnnnnnnnnnnnnnnnnnnnnnnnnnnnnnnnnnnnnnnnnnnnnnnnnnnnnnnnnnnnnnnnnnnnnnnnnnnnnnnnnnnnnnnnnnnnnnnnnnnnnnnnnnnnnnnnnnnnnnnnnnnnnnnnnnnnnnnnnnnnnnnnnnnnnnnnnnnnnnnnnnnnnnnnnnnnnnnnnnnnnnnnnnnnnnnnnnnnnnnnnnnnnnnnnnnnnnnnnnnnnnnnnnnnnnnnnnnnnnnnnnnnnnnnnnnnnnnnnnnnnnnnnnnnnnnnnnnnnnnnnnnnnnnnnnnnnnnnnnnnnnnnnnnnnnnnnnnnnnnnnnnnnnnnnnnnnnnnnnnnnnnnnnnnnnnnnnnnnnnnnnnnnnnnnnnnnnnnnnnnnnnnnnnnnnnnnnnnnnnnnnnnnnnnnnnnnnnnnnnnnnnnnnnnnnnnnnnnnnnnnnnnnnnnnnnnnnnnnnnnnnnnnnnnnnnnnnnnnnnnnnnnnnnnnnnnnnnnnnnnnnnnnnnnnnnnnnnnnnnnnnnnnnnnnnnnnnnnnnnnnnnnnnnnnnnnnnnnnnnnnnnnnnnnnnnnnnnnnnnnnnnnnnnnnnnnnnnnnnnnnnnnnnnnnnnnnnnnnnnnnnnnnnnnnnnnnnnnnnnnnnnnnnnnnnnnnnnnnnnnnnnnnnnnnnnnnnnnnnnnnnnnnnnnnnnnnnnnnnnnnnnnnnnnnnnnnnnnnnnnnnnnnnnnnnnnnnnnnnnnnnnnnnnnnnnnnnnnnnnnnnnnnnnnnnnnnnnnnnnnnnnnnnnnnnnnnnnnnnnnnnnnnnnnnnnnnnnnnnnnnnnnnnnnnnnnnnnnnnnnnnnnnnnnnnnnnnnnnnnnnnnnnnnnnnnnnnnnnnnnnnnnnnnnnnnnnnnnnnnnnnnnnnnnnnnnnnnnnnnnnnnnnnnnnnnnnnnnnnnnnnnnnnnnnnnnnnnnnnnnnnnnnnnnnnnnnnnnnnnnnnnnnnnnnnnnnnnnnnnnnnnnnnnnnnnnnnnnnnnnnnnnnnnnnnnnnnnnnnnnnnnnnnnnnnnnnnnnnnnnnnnnnnnnnnnnnnnnnnnnnnnnnnnnnnnnnnnnnnnnnnnnnnnnnnnnnnnnnnnnnnnnnnnnnnnnnnnnnnnnnnnnnnnnnnnnnnnnnnnnnnnnnnnnnnnnnnnnnnnnnnnnnnnnnnnnnnnnnnnnnnnnnnnnnnnnnnnnnnnnnnnnnnnnnnnnnnnnnnnnnnnnnnnnnnnnnnnnnnnnnnnnnnnnnnnnnnnnnnnnnnnnnnnnnnnnnnnnnnnnnnnnnnnnnnnnnnnnnnnnnnnnnnnnnnnnnnnnnnnnnnnnnnnnnnnnnnnnnnnnnnnnnnnnnnnnnnnnnnnnnnnnnnnnnnnnnnnnnnnnnnnnnnnnnnnnnnnnnnnnnnnnnnnnnnnnnnnnnnnnnnnnnnnnnnnnnnnnnnnnnnnnnnnnnnnnnnnnnnnnnnnnnnnnnnnnnnnnnnnnnnnnnnnnnnnnnnnnnnnnnnnnnnnnnnnnnnnnnnnnnnnnnnnnnnnnnnnnnnnnnnnnnnnnnnnnnnnnnnnnnnnnnnnnnnnnnnnnnnnnnnnnnnnnnnnnnnnnnnnnnnnnnnnnnnnnnnnnnnnnnnnnnnnnnnnnnnnnnnnnnnnnnnnnnnnnnnnnnnnnnnnnnnnnnnnnnnnnnnnnnnnnnnnnnnnnnnnnnnnnnnnnnnnnnnnnnnnnnnnnnnnnnnnnnnnnnnnnnnnnnnnnnnnnnnnnnnnnnnnnnnnnnnnnnnnnnnnnnnnnnnnnnnnnnnnnnnnnnnnnnnnnnnnnnnnnnnnnnnnnnnnnnnnnnnnnnnnnnnnnnnnnnnnnnnnnnnnnnnnnnnnnnnnnnnnnnnnnnnnnnnnnnnnnnnnnnnnnnnnnnnnnnnnnnnnnnnnnnnnnnnnnnnnnnnnnnnnnnnnnnnnnnnnnnnnnnnnnnnnnnnnnnnnnnnnnnnnnnnnnnnnnnnnnnnnnnnnnnnnnnnnnnnnnnnnnnnnnnnnnnnnnnnnnnnnnnnnnnnnnnnnnnnnnnnnnnnnnnnnnnnnnnnnnnnnnnnnnnnnnnnnnnnnnnnnnnnnnnnnnnnnnnnnnnnnnnnnnnnnnnnnnnnnnnnnnnnnnnnnnnnnnnnnnnnnnnnnnnnnnnnnnnnnnnnnnnnnnnnnnnnnnnnnnnnnnnnnnnnnnnnnnnnnnnnnnnnnnnnnnnnnnnnnnnnnnnnnnnnnnnnnnnnnnnnnnnnnnnnnnnnnnnnnnnnnnnnnnnnnnnnnnnnnnnnnnnnnnnnnnnnnnnnnnnnnnnnnnnnnnnnnnnnnnnnnnnnnnnnnnnnnnnnnnnnnnnnnnnnnnnnnnnnnnnnnnnnnnnnnnnnnnnnnnnnnnnnnnnnnnnnnnnnnnnnnnnnnnnnnnnnnnnnnnnnnnnnnnnnnnnnnnnnnnnnnnnnnnnnnnnnnnnnnnnnnnnnnnnnnnnnnnnnnnnnnnnnnnnnnnnnnnnnnnnnnnnnnnnnnnnnnnnnnnnnnnnnnnnnnnnnnnnnnnnnnnnnnnnnnnnnnnnnnnnnnnnnnnnnnnnnnnnnnnnnnnnnnnnnnnnnnnnnnnnnnnnnnnnnnnnnnnnnnnnnnnnnnnnnnnnnnnnnnnnnnnnnnnnnnnnnnnnnnnnnnnnnnnnnnnnnnnnnnnnnnnnnnnnnnnnnnnnnnnnnnnnnnnnnnnnnnnnnnnnnnnnnnnnnnnnnnnnnnnnnnnnnnnnnnnnnnnnnnnnnnnnnnnnnnnnnnnnnnnnnnnnnnnnnnnnnnnnnnnnnnnnnnnnnnnnnnnnnnnnnnnnnnnnnnnnnnnnnnnnnnnnnnnnnnnnnnnnnnnnnnnnnnnnnnnnnnnnnnnnnnnnnnnnnnnnnnnnnnnnnnnnnnnnnnnnnnnnnnnnnnnnnnnnnnnnnnnnnnnnnnnnnnnnnnnnnnnnnnnnnnnnnnnnnnnnnnnnnnnnnnnnnnnnnnnnnnnnnnnnnnnnnnnnnnnnnnnnnnnnnnnnnnnnnnnnnnnnnnnnnnnnnnnnnnnnnnnnnnnnnnnnnnnnnnnnnnnnnnnnnnnnnnnnnnnnnnnnnnnnnnnnnnnnnnnnnnnnnnnnnnnnnnnnnnnnnnnnnnnnnnnnnnnnnnnnnnnnnnnnnnnnnnnnnnnnnnnnnnnnnnnnnnnnnnnnnnnnnnnnnnnnnnnnnnnnnnnnnnnnnnnnnnnnnnnnnnnnnnnnnnnnnnnnnnnnnnnnnnnnnnnnnnnnnnnnnnnnnnnnnnnnnnnnnnnnnnnnnnnnnnnnnnnnnnnnnnnnnnnnnnnnnnnnnnnnnnnnnnnnnnnnnnnnnnnnnnnnnnnnnnnnnnnnnnnnnnnnnnnnnnnnnnnnnnnnnnnnnnnnnnnnnnnnnnnnnnnnnnnnnnnnnnnnnnnnnnnnnnnnnnnnnnnnnnnnnnnnnnnnnnnnnnnnnnnnnnnnnnnnnnnnnnnnnnnnnnnnnnnnnnnnnnnnnnnnnnnnnnnnnnnnnnnnnnnnnnnnnnnnnnnnnnnnnnnnnnnnnnnnnnnnnnnnnnnnnnnnnnnnnnnnnnnnnnnnnnnnnnnnnnnnnnnnnnnnnnnnnnnnnnnnnnnnnnnnnnnnnnnnnnnnnnnnnnnnnnnnnnnnnnnnnnnnnnnnnnnnnnnnnnnnnnnnnnnnnnnnnnnnnnnnnnnnnnnnnnnnnnnnnnnnnnnnnnnnnnnnnnnnnnnnnnnnnnnnnnnnnnnnnnnnnnnnnnnnnnnnnnnnnnnnnnnnnnnnnnnnnnnnnnnnnnnnnnnnnnnnnnnnnnnnnnnnnnnnnnnnnnnnnnnnnnnnnnnnnnnnnnnnnnnnnnnnnnnnnnnnnnnnnnnnnnnnnnnnnnnnnnnnnnnnnnnnnnnnnnnnnnnnnnnnnnnnnnnnnnnnnnnnnnnnnnnnnnnnnnnnnnnnnnnnnnnnnnnnnnnnnnnnnnnnnnnnnnnnnnnnnnnnnnnnnnnnnnnnnnnnnnnnnnnnnnnnnnnnnnnnnnnnnnnnnnnnnnnnnnnnnnnnnnnnnnnnnnnnnnnnnnnnnnnnnnnnnnnnnnnnnnnnnnnnnnnnnnnnnnnnnnnnnnnnnnnnnnnnnnnnnnnnnnnnnnnnnnnnnnnnnnnnnnnnnnnnnnnnnnnnnnnnnnnnnnnnnnnnnnnnnnnnnnnnnnnnnnnnnnnnnnnnnnnnnnnnnnnnnnnnnnnnnnnnnnnnnnnnnnnnnnnnnnnnnnnnnnnnnnnnnnnnnnnnnnnnnnnnnnnnnnnnnnnnnnnnnnnnnnnnnnnnnnnnnnnnnnnnnnnnnnnnnnnnnnnnnnnnnnnnnnnnnnnnnnnnnnnnnnnnnnnnnnnnnnnnnnnnnnnnnnnnnnnnnnnnnnnnnnnnnnnnnnnnnnnnnnnnnnnnnnnnnnnnnnnnnnnnnnnnnnnnnnnnnnnnnnnnnnnnnnnnnnnnnnnnnnnnnnnnnnnnnnnnnnnnnnnnnnnnnnnnnnnnnnnnnnnnnnnnnnnnnnnnnnnnnnnnnnnnnnnnnnnnnnnnnnnnnnnnnnnnnnnnnnnnnnnnnnnnnnnnnnnnnnnnnnnnnnnnnnnnnnnnnnnnnnnnnnnnnnnnnnnnnnnnnnnnnnnnnnnnnnnnnnnnnnnnnnnnnnnnnnnnnnnnnnnnnnnnnnnnnnnnnnnnnnnnnnnnnnnnnnnnnnnnnnnnnnnnnnnnnnnnnnnnnnnnnnnnnnnnnnnnnnnnnnnnnnnnnnnnnnnnnnnnnnnnnnnnnnnnnnnnnnnnnnnnnnnnnnnnnnnnnnnnnnnnnnnnnnnnnnnnnnnnnnnnnnnnnnnnnnnnnnnnnnnnnnnnnnnnnnnnnnnnnnnnnnnnnnnnnnnnnnnnnnnnnnnnnnnnnnnnnnnnnnnnnnnnnnnnnnnnnnnnnnnnnnnnnnnnnnnnnnnnnnnnnnnnnnnnnnnnnnnnnnnnnnnnnnnnnnnnnnnnnnnnnnnnnnnnnnnnnnnnnnnnnnnnnnnnnnnnnnnnnnnnnnnnnnnnnnnnnnnnnnnnnnnnnnnnnnnnnnnnnnnnnnnnnnnnnnnnnnnnnnnnnnnnnnnnnnnnnnnnnnnnnnnnnnnnnnnnnnnnnnnnnnnnnnnnnnnnnnnnnnnnnnnnnnnnnnnnnnnnnnnnnnnnnnnnnnnnnnnnnnnnnnnnnnnnnnnnnnnnnnnnnnnnnnnnnnnnnnnnnnnnnnnnnnnnnnnnnnnnnnnnnnnnnnnnnnnnnnnnnnnnnnnnnnnnnnnnnnnnnnnnnnnnnnnnnnnnnnnnnnnnnnnnnnnnnnnnnnnnnnnnnnnnnnnnnnnnnnnnnnnnnnnnnnnnnnnnnnnnnnnnnnnnnnnnnnnnnnnnnnnnnnnnnnnnnnnnnnnnnnnnnnnnnnnnnnnnnnnnnnnnnnnnnnnnnnnnnnnnnnnnnnnnnnnnnnnnnnnnnnnnnnnnnnnnnnnnnnnnnnnnnnnnnnnnnnnnnnnnnnnnnnnnnnnnnnnnnnnnnnnnnnnnnnnnnnnnnnnnnnnnnnnnnnnnnnnnnnnnnnnnnnnnnnnnnnnnnnnnnnnnnnnnnnnnnnnnnnnnnnnnnnnnnnnnnnnnnnnnnnnnnnnnnnnnnnnnnnnnnnnnnnnnnnnnnnnnnnnnnnnnnnnnnnnnnnnnnnnnnnnnnnnnnnnnnnnnnnnnnnnnnnnnnnnnnnnnnnnnnnnnnnnnnnnnnnnnnnnnnnnnnnnnnnnnnnnnnnnnnnnnnnnnnnnnnnnnnnnnnnnnnnnnnnnnnnnnnnnnnnnnnnnnnnnnnnnnnnnnnnnnnnnnnnnnnnnnnnnnnnnnnnnnnnnnnnnnnnnnnnnnnnnnnnnnnnnnnnnnnnnnnnnnnnnnnnnnnnnnnnnnnnnnnnnnnnnnnnnnnnnnnnnnnnnnnnnnnnnnnnnnnnnnnnnnnnnnnnnnnnnnnnnnnnnnnnnnnnnnnnnnnnnnnnnnnnnnnnnnnnnnnnnnnnnnnnnnnnnnnnnnnnnnnnnnnnnnnnnnnnnnnnnnnnnnnnnnnnnnnnnnnnnnnnnnnnnnnnnnnnnnnnnnnnnnnnnnnnnnnnnnnnnnnnnnnnnnnnnnnnnnnnnnnnnnnnnnnnnnnnnnnnnnnnnnnnnnnnnnnnnnnnnnnnnnnnnnnnnnnnnnnnnnnnnnnnnnnnnnnnnnnnnnnnnnnnnnnnnnnnnnnnnnnnnnnnnnnnnnnnnnnnnnnnnnnnnnnnnnnnnnnnnnnnnnnnnnnnnnnnnnnnnnnnnnnnnnnnnnnnnnnnnnnnnnnnnnnnnnnnnnnnnnnnnnnnnnnnnnnnnnnnnnnnnnnnnnnnnnnnnnnnnnnnnnnnnnnnnnnnnnnnnnnnnnnnnnnnnnnnnnnnnnnnnnnnnnnnnnnnnnnnnnnnnnnnnnnnnnnnnnnnnnnnnnnnnnnnnnnnnnnnnnnnnnnnnnnnnnnnnnnnnnnnnnnnnnnnnnnnnnnnnnnnnnnnnnnnnnnnnnnnnnnnnnnnnnnnnnnnnnnnnnnnnnnnnnnnnnnnnnnnnnnnnnnnnnnnnnnnnnnnnnnnnnnnnnnnnnnnnnnnnnnnnnnnnnnnnnnnnnnnnnnnnnnnnnnnnnnnnnnnnnnnnnnnnnnnnnnnnnnnnnnnnnnnnnnnnnnnnnnnnnnnnnnnnnnnnnnnnnnnnnnnnnnnnnnnnnnnnnnnnnnnnnnnnnnnnnnnnnnnnnnnnnnnnnnnnnnnnnnnnnnnnnnnnnnnnnnnnnnnnnnnnnnnnnnnnnnnnnnnnnnnnnnnnnnnnnnnnnnnnnnnnnnnnnnnnnnnnnnnnnnnnnnnnnnnnnnnnnnnnnnnnnnnnnnnnnnnnnnnnnnnnnnnnnnnnnnnnnnnnnnnnnnnnnnnnnnnnnnnnnnnnnnnnnnnnnnnnnnnnnnnnnnnnnnnnnnnnnnnnnnnnnnnnnnnnnnnnnnnnnnnnnnnnnnnnnnnnnnnnnnnnnnnnnnnnnnnnnnnnnnnnnnnnnnnnnnnnnnnnnnnnnnnnnnnnnnnnnnnnnnnnnnnnnnnnnnnnnnnnnnnnnnnnnnnnnnnnnnnnnnnnnnnnnnnnnnnnnnnnnnnnnnnnnnnnnnnnnnnnnnnnnnnnnnnnnnnnnnnnnnnnnnnnnnnnnnnnnnnnnnnnnnnnnnnnnnnnnnnnnnnnnnnnnnnnnnnnnnnnnnnnnnnnnnnnnnnnnnnnnnnnnnnnnnnnnnnnnnnnnnnnnnnnnnnnnnnnnnnnnnnnnnnnnnnnnnnnnnnnnnnnnnnnnnnnnnnnnnnnnnnnnnnnnnnnnnnnnnnnnnnnnnnnnnnnnnnnnnnnnnnnnnnnnnnnnnnnnnnnnnnnnnnnnnnnnnnnnnnnnnnnnnnnnnnnnnnnnnnnnnnnnnnnnnnnnnnnnnnnnnnnnnnnnnnnnnnnnnnnnnnnnnnnnnnnnnnnnnnnnnnnnnnnnnnnnnnnnnnnnnnnnnnnnnnnnnnnnnnnnnnnnnnnnnnnnnnnnnnnnnnnnnnnnnnnnnnnnnnnnnnnnnnnnnnnnnnnnnnnnnnnnnnnnnnnnnnnnnnnnnnnnnnnnnnnnnnnnnnnnnnnnnnnnnnnnnnnnnnnnnnnnnnnnnnnnnnnnnnnnnnnnnnnnnnnnnnnnnnnnnnnnnnnnnnnnnnnnnnnnnnnnnnnnnnnnnnnnnnnnnnnnnnnnnnnnnnnnnnnnnnnnnnnnnnnnnnnnnnnnnnnnnnnnnnnnnnnnnnnnnnnnnnnnnnnnnnnnnnnnnnnnnnnnnnnnnnnnnnnnnnnnnnnnnnnnnnnnnnnnnnnnnnnnnnnnnnnnnnnnnnnnnnnnnnnnnnnnnnnnnnnnnnnnnnnnnnnnnnnnnnnnnnnnnnnnnnnnnnnnnnnnnnnnnnnnnnnnnnnnnnnnnnnnnnnnnnnnnnnnnnnnnnnnnnnnnnnnnnnnnnnnnnnnnnnnnnnnnnnnnnnnnnnnnnnnnnnnnnnnnnnnnnnnnnnnnnnnnnnnnnnnnnnnnnnnnnnnnnnnnnnnnnnnnnnnnnnnnnnnnnnnnnnnnnnnnnnnnnnnnnnnnnnnnnnnnnnnnnnnnnnnnnnnnnnnnnnnnnnnnnnnnnnnnnnnnnnnnnnnnnnnnnnnnnnnnnnnnnnnnnnnnnnnnnnnnnnnnnnnnnnnnnnnnnnnnnnnnnnnnnnnnnnnnnnnnnnnnnnnnnnnnnnnnnnnnnnnnnnnnnnnnnnnnnnnnnnnnnnnnnnnnnnnnnnnnnnnnnnnnnnnnnnnnnnnnnnnnnnnnnnnnnnnnnnnnnnnnnnnnnnnnnnnnnnnnnnnnnnnnnnnnnnnnnnnnnnnnnnnnnnnnnnnnnnnnnnnnnnnnnnnnnnnnnnnnnnnnnnnnnnnnnnnnnnnnnnnnnnnnnnnnnnnnnnnnnnnnnnnnnnnnnnnnnnnnnnnnnnnnnnnnnnnnnnnnnnnnnnnnnnnnnnnnnnnnnnnnnnnnnnnnnnnnnnnnnnnnnnnnnnnnnnnnnnnnnnnnnnnnnnnnnnnnnnnnnnnnnnnnnnnnnnnnnnnnnnnnnnnnnnnnnnnnnnnnnnnnnnnnnnnnnnnnnnnnnnnnnnnnnnnnnnnnnnnnnnnnnnnnnnnnnnnnnnnnnnnnnnnnnnnnnnnnnnnnnnnnnnnnnnnnnnnnnnnnnnnnnnnnnnnnnnnnnnnnnnnnnnnnnnnnnnnnnnnnnnnnnnnnnnnnnnnnnnnnnnnnnnnnnnnnnnnnnnnnnnnnnnnnnnnnnnnnnnnnnnnnnnnnnnnnnnnnnnnnnnnnnnnnnnnnnnnnnnnnnnnnnnnnnnnnnnnnnnnnnnnnnnnnnnnnnnnnnnnnnnnnnnnnnnnnnnnnnnnnnnnnnnnnnnnnnnnnnnnnnnnnnnnnnnnnnnnnnnnnnnnnnnnnnnnnnnnnnnnnnnnnnnnnnnnnnnnnnnnnnnnnnnnnnnnnnnnnnnnnnnnnnnnnnnnnnnnnnnnnnnnnnnnnnnnnnnnnnnnnnnnnnnnnnnnnnnnnnnnnnnnnnnnnnnnnnnnnnnnnnnnnnnnnnnnnnnnnnnnnnnnnnnnnnnnnnnnnnnnnnnnnnnnnnnnnnnnnnnnnnnnnnnnnnnnnnnnnnnnnnnnnnnnnnnnnnnnnnnnnnnnnnnnnnnnnnnnnnnnnnnnnnnnnnnnnnnnnnnnnnnnnnnnnnnnnnnnnnnnnnnnnnnnnnnnnnnnnnnnnnnnnnnnnnnnnnnnnnnnnnnnnnnnnnnnnnnnnnnnnnnnnnnnnnnnnnnnnnnnnnnnnnnnnnnnnnnnnnnnnnnnnnnnnnnnnnnnnnnnnnnnnnnnnnnnnnnnnnnnnnnnnnnnnnnnnnnnnnnnnnnnnnnnnnnnnnnnnnnnnnnnnnnnnnnnnnnnnnnnnnnnnnnnnnnnnnnnnnnnnnnnnnnnnnnnnnnnnnnnnnnnnnnnnnnnnnnnnnnnnnnnnnnnnnnnnnnnnnnnnnnnnnnnnnnnnnnnnnnnnnnnnnnnnnnnnnnnnnnnnnnnnnnnnnnnnnnnnnnnnnnnnnnnnnnnnnnnnnnnnnnnnnnnnnnnnnnnnnnnnnnnnnnnnnnnnnnnnnnnnnnnnnnnnnnnnnnnnnnnnnnnnnnnnnnnnnnnnnnnnnnnnnnnnnnnnnnnnnnnnnnnnnnnnnnnnnnnnnnnnnnnnnnnnnnnnnnnnnnnnnnnnnnnnnnnnnnnnnnnnnnnnnnnnnnnnnnnnnnnnnnnnnnnnnnnnnnnnnnnnnnnnnnnnnnnnnnnnnnnnnnnnnnnnnnnnnnnnnnnnnnnnnnnnnnnnnnnnnnnnnnnnnnnnnnnnnnnnnnnnnnnnnnnnnnnnnnnnnnnnnnnnnnnnnnnnnnnnnnnnnnnnnnnnnnnnnnnnnnnnnnnnnnnnnnnnnnnnnnnnnnnnnnnnnnnnnnnnnnnnnnnnnnnnnnnnnnnnnnnnnnnnnnnnnnnnnnnnnnnnnnnnnnnnnnnnnnnnnnnnnnnnnnnnnnnnnnnnnnnnnnnnnnnnnnnnnnnnnnnnnnnnnnnnnnnnnnnnnnnnnnnnnnnnnnnnnnnnnnnnnnnnnnnnnnnnnnnnnnnnnnnnnnnnnnnnnnnnnnnnnnnnnnnnnnnnnnnnnnnnnnnnnnnnnnnnnnnnnnnnnnnnnnnnnnnnnnnnnnnnnnnnnnnnnnnnnnnnnnnnnnnnnnnnnnnnnnnnnnnnnnnnnnnnnnnnnnnnnnnnnnnnnnnnnnnnnnnnnnnnnnnnnnnnnnnnnnnnnnnnnnnnnnnnnnnnnnnnnnnnnnnnnnnnnnnnnnnnnnnnnnnnnnnnnnnnnnnnnnnnnnnnnnnnnnnnnnnnnnnnnnnnnnnnnnnnnnnnnnnnnnnnnnnnnnnnnnnnnnnnnnnnnnnnnnnnnnnnnnnnnnnnnnnnnnnnnnnnnnnnnnnnnnnnnnnnnnnnnnnnnnnnnnnnnnnnnnnnnnnnnnnnnnnnnnnnnnnnnnnnnnnnnnnnnnnnnnnnnnnnnnnnnnnnnnnnnnnnnnnnnnnnnnnnnnnnnnnnnnnnnnnnnnnnnnnnnnnnnnnnnnnnnnnnnnnnnnnnnnnnnnnnnnnnnnnnnnnnnnnnnnnnnnnnnnnnnnnnnnnnnnnnnnnnnnnnnnnnnnnnnnnnnnnnnnnnnnnnnnnnnnnnnnnnnnnnnnnnnnnnnnnnnnnnnnnnnnnnnnnnnnnnnnnnnnnnnnnnnnnnnnnnnnnnnnnnnnnnnnnnnnnnnnnnnnnnnnnnnnnnnnnnnnnnnnnnnnnnnnnnnnnnnnnnnnnnnnnnnnnnnnnnnnnnnnnnnnnnnnnnnnnnnnnnnnnnnnnnnnnnnnnnnnnnnnnnnnnnnnnnnnnnnnnnnnnnnnnnnnnnnnnnnnnnnnnnnnnnnnnnnnnnnnnnnnnnnnnnnnnnnnnnnnnnnnnnnnnnnnnnnnnnnnnnnnnnnnnnnnnnnnnnnnnnnnnnnnnnnnnnnnnnnnnnnnnnnnnnnnnnnnnnnnnnnnnnnnnnnnnnnnnnnnnnnnnnnnnnnnnnnnnnnnnnnnnnnnnnnnnnnnnnnnnnnnnnnnnnnnnnnnnnnnnnnnnnnnnnnnnnnnnnnnnnnnnnnnnnnnnnnnnnnnnnnnnnnnnnnnnnnnnnnnnnnnnnnnnnnnnnnnnnnnnnnnnnnnnnnnnnnnnnnnnnnnnnnnnnnnnnnnnnnnnnnnnnnnnnnnnnnnnnnnnnnnnnnnnnnnnnnnnnnnnnnnnnnnnnnnnnnnnnnnnnnnnnnnnnnnnnnnnnnnnnnnnnnnnnnnnnnnnnnnnnnnnnnnnnnnnnnnnnnnnnnnnnnnnnnnnnnnnnnnnnnnnnnnnnnnnnnnnnnnnnnnnnnnnnnnnnnnnnnnnnnnnnnnnnnnnnnnnnnnnnnnnnnnnnnnnnnnnnnnnnnnnnnnnnnnnnnnnnnnnnnnnnnnnnnnnnnnnnnnnnnnnnnnnnnnnnnnnnnnnnnnnnnnnnnnnnnnnnnnnnnnnnnnnnnnnnnnnnnnnnnnnnnnnnnnnnnnnnnnnnnnnnnnnnnnnnnnnnnnnnnnnnnnnnnnnnnnnnnnnnnnnnnnnnnnnnnnnnnnnnnnnnnnnnnnnnnnnnnnnnnnnnnnnnnnnnnnnnnnnnnnnnnnnnnnnnnnnnnnnnnnnnnnnnnnnnnnnnnnnnnnnnnnnnnnnnnnnnnnnnnnnnnnnnnnnnnnnnnnnnnnnnnnnnnnnnnnnnnnnnnnnnnnnnnnnnnnnnnnnnnnnnnnnnnnnnnnnnnnnnnnnnnnnnnnnnnnnnnnnnnnnnnnnnnnnnnnnnnnnnnnnnnnnnnnnnnnnnnnnnnnnnnnnnnnnnnnnnnnnnnnnnnnnnnnnnnnnnnnnnnnnnnnnnnnnnnnnnnnnnnnnnnnnnnnnnnnnnnnnnnnnnnnnnnnnnnnnnnnnnnnnnnnnnnnnnnnnnnnnnnnnnnnnnnnnnnnnnnnnnnnnnnnnnnnnnnnnnnnnnnnnnnnnnnnnnnnnnnnnnnnnnnnnnnnnnnnnnnnnnnnnnnnnnnnnnnnnnnnnnnnnnnnnnnnnnnnnnnnnnnnnnnnnnnnnnnnnnnnnnnnnnnnnnnnnnnnnnnnnnnnnnnnnnnnnnnnnnnnnnnnnnnnnnnnnnnnnnnnnnnnnnnnnnnnnnnnnnnnnnnnnnnnnnnnnnnnnnnnnnnnnnnnnnnnnnnnnnnnnnnnnnnnnnnnnnnnnnnnnnnnnnnnnnnnnnnnnnnnnnnnnnnnnnnnnnnnnnnnnnnnnnnnnnnnnnnnnnnnnnnnnnnnnnnnnnnnnnnnnnnnnnnnnnnnnnnnnnnnnnnnnnnnnnnnnnnnnnnnnnnnnnnnnnnnnnnnnnnnnnnnnnnnnnnnnnnnnnnnnnnnnnnnnnnnnnnnnnnnnnnnnnnnnnnnnnnnnnnnnnnnnnnnnnnnnnnnnnnnnnnnnnnnnnnnnnnnnnnnnnnnnnnnnnnnnnnnnnnnnnnnnnnnnnnnnnnnnnnnnnnnnnnnnnnnnnnnnnnnnnnnnnnnnnnnnnnnnnnnnnnnnnnnnnnnnnnnnnnnnnnnnnnnnnnnnnnnnnnnnnnnnnnnnnnnnnnnnnnnnnnnnnnnnnnnnnnnnnnnnnnnnnnnnnnnnnnnnnnnnnnnnnnnnnnnnnnnnnnnnnnnnnnnnnnnnnnnnnnnnnnnnnnnnnnnnnnnnnnnnnnnnnnnnnnnnnnnnnnnnnnnnnnnnnnnnnnnnnnnnnnnnnnnnnnnnnnnnnnnnnnnnnnnnnnnnnnnnnnnnnnnnnnnnnnnnnnnnnnnnnnnnnnnnnnnnnnnnnnnnnnnnnnnnnnnnnnnnnnnnnnnnnnnnnnnnnnnnnnnnnnnnnnnnnnnnnnnnnnnnnnnnnnnnnnnnnnnnnnnnnnnnnnnnnnnnnnnnnnnnnnnnnnnnnnnnnnnnnnnnnnnnnnnnnnnnnnnnnnnnnnnnnnnnnnnnnnnnnnnnnnnnnnnnnnnnnnnnnnnnnnnnnnnnnnnnnnnnnnnnnnnnnnnnnnnnnnnnnnnnnnnnnnnnnnnnnnnnnnnnnnnnnnnnnnnnnnnnnnnnnnnnnnnnnnnnnnnnnnnnnnnnnnnnnnnnnnnnnnnnnnnnnnnnnnnnnnnnnnnnnnnnnnnnnnnnnnnnnnnnnnnnnnnnnnnnnnnnnnnnnnnnnnnnnnnnnnnnnnnnnnnnnnnnnnnnnnnnnnnnnnnnnnnnnnnnnnnnnnnnnnnnnnnnnnnnnnnnnnnnnnnnnnnnnnnnnnnnnnnnnnnnnnnnnnnnnnnnnnnnnnnnnnnnnnnnnnnnnnnnnnnnnnnnnnnnnnnnnnnnnnnnnnnnnnnnnnnnnnnnnnnnnnnnnnnnnnnnnnnnnnnnnnnnnnnnnnnnnnnnnnnnnnnnnnnnnnnnnnnnnnnnnnnnnnnnnnnnnnnnnnnnnnnnnnnnnnnnnnnnnnnnnnnnnnnnnnnnnnnnnnnnnnnnnnnnnnnnnnnnnnnnnnnnnnnnnnnnnnnnnnnnnnnnnnnnnnnnnnnnnnnnnnnnnnnnnnnnnnnnnnnnnnnnnnnnnnnnnnnnnnnnnnnnnnnnnnnnnnnnnnnnnnnnnnnnnnnnnnnnnnnnnnnnnnnnnnnnnnnnnnnnnnnnnnnnnnnnnnnnnnnnnnnnnnnnnnnnnnnnnnnnnnnnnnnnnnnnnnnnnnnnnnnnnnnnnnnnnnnnnnnnnnnnnnnnnnnnnnnnnnnnnnnnnnnnnnnnnnnnnnnnnnnnnnnnnnnnnnnnnnnnnnnnnnnnnnnnnnnnnnnnnnnnnnnnnnnnnnnnnnnnnnnnnnnnnnnnnnnnnnnnnnnnnnnnnnnnnnnnnnnnnnnnnnnnnnnnnnnnnnnnnnnnnnnnnnnnnnnnnnnnnnnnnnnnnnnnnnnnnnnnnnnnnnnnnnnnnnnnnnnnnnnnnnnnnnnnnnnnnnnnnnnnnnnnnnnnnnnnnnnnnnnnnnnnnnnnnnnnnnnnnnnnnnnnnnnnnnnnnnnnnnnnnnnnnnnnnnnnnnnnnnnnnnnnnnnnnnnnnnnnnnnnnnnnnnnnnnnnnnnnnnnnnnnnnnnnnnnnnnnnnnnnnnnnnnnnnnnnnnnnnnnnnnnnnnnnnnnnnnnnnnnnnnnnnnnnnnnnnnnnnnnnnnnnnnnnnnnnnnnnnnnnnnnnnnnnnnnnnnnnnnnnnnnnnnnnnnnnnnnnnnnnnnnnnnnnnnnnnnnnnnnnnnnnnnnnnnnnnnnnnnnnnnnnnnnnnnnnnnnnnnnnnnnnnnnnnnnnnnnnnnnnnnnnnnnnnnnnnnnnnnnnnnnnnnnnnnnnnnnnnnnnnnnnnnnnnnnnnnnnnnnnnnnnnnnnnnnnnnnnnnnnnnnnnnnnnnnnnnnnnnnnnnnnnnnnnnnnnnnnnnnnnnnnnnnnnnnnnnnnnnnnnnnnnnnnnnnnnnnnnnnnnnnnnnnnnnnnnnnnnnnnnnnnnnnnnnnnnnnnnnnnnnnnnnnnnnnnnnnnnnnnnnnnnnnnnnnnnnnnnnnnnnnnnnnnnnnnnnnnnnnnnnnnnnnnnnnnnnnnnnnnnnnnnnnnnnnnnnnnnnnnnnnnnnnnnnnnnnnnnnnnnnnnnnnnnnnnnnnnnnnnnnnnnnnnnnnnnnnnnnnnnnnnnnnnnnnnnnnnnnnnnnnnnnnnnnnnnnnnnnnnnnnnnnnnnnnnnnnnnnnnnnnnnnnnnnnnnnnnnnnnnnnnnnnnnnnnnnnnnnnnnnnnnnnnnnnnnnnnnnnnnnnnnnnnnnnnnnnnnnnnnnnnnnnnnnnnnnnnnnnnnnnnnnnnnnnnnnnnnnnnnnnnnnnnnnnnnnnnnnnnnnnnnnnnnnnnnnnnnnnnnnnnnnnnnnnnnnnnnnnnnnnnnnnnnnnnnnnnnnnnnnnnnnnnnnnnnnnnnnnnnnnnnnnnnnnnnnnnnnnnnnnnnnnnnnnnnnnnnnnnnnnnnnnnnnnnnnnnnnnnnnnnnnnnnnnnnnnnnnnnnnnnnnnnnnnnnnnnnnnnnnnnnnnnnnnnnnnnnnnnnnnnnnnnnnnnnnnnnnnnnnnnnnnnnnnnnnnnnnnnnnnnnnnnnnnnnnnnnnnnnnnnnnnnnnnnnnnnnnnnnnnnnnnnnnnnnnnnnnnnnnnnnnnnnnnnnnnnnnnnnnnnnnnnnnnnnnnnnnnnnnnnnnnnnnnnnnnnnnnnnnnnnnnnnnnnnnnnnnnnnnnnnnnnnnnnnnnnnnnnnnnnnnnnnnnnnnnnnnnnnnnnnnnnnnnnnnnnnnnnnnnnnnnnnnnnnnnnnnnnnnnnnnnnnnnnnnnnnnnnnnnnnnnnnnnnnnnnnnnnnnnnnnnnnnnnnnnnnnnnnnnnnnnnnnnnnnnnnnnnnnnnnnnnnnnnnnnnnnnnnnnnnnnnnnnnnnnnnnnnnnnnnnnnnnnnnnnnnnnnnnnnnnnnnnnnnnnnnnnnnnnnnnnnnnnnnnnnnnnnnnnnnnnnnnnnnnnnnnnnnnnnnnnnnnnnnnnnnnnnnnnnnnnnnnnnnnnnnnnnnnnnnnnnnnnnnnnnnnnnnnnnnnnnnnnnnnnnnnnnnnnnnnnnnnnnnnnnnnnnnnnnnnnnnnnnnnnnnnnnnnnnnnnnnnnnnnnnnnnnnnnnnnnnnnnnnnnnnnnnnnnnnnnnnnnnnnnnnnnnnnnnnnnnnnnnnnnnnnnnnnnnnnnnnnnnnnnnnnnnnnnnnnnnnnnnnnnnnnnnnnnnnnnnnnnnnnnnnnnnnnnnnnnnnnnnnnnnnnnnnnnnnnnnnnnnnnnnnnnnnnnnnnnnnnnnnnnnnnnnnnnnnnnnnnnnnnnnnnnnnnnnnnnnnnnnnnnnnnnnnnnnnnnnnnnnnnnnnnnnnnnnnnnnnnnnnnnnnnnnnnnnnnnnnnnnnnnnnnnnnnnnnnnnnnnnnnnnnnnnnnnnnnnnnnnnnnnnnnnnnnnnnnnnnnnnnnnnnnnnnnnnnnnnnnnnnnnnnnnnnnnnnnnnnnnnnnnnnnnnnnnnnnnnnnnnnnnnnnnnnnnnnnnnnnnnnnnnnnnnnnnnnnnnnnnnnnnnnnnnnnnnnnnnnnnnnnnnnnnnnnnnnnnnnnnnnnnnnnnnnnnnnnnnnnnnnnnnnnnnnnnnnnnnnnnnnnnnnnnnnnnnnnnnnnnnnnnnnnnnnnnnnnnnnnnnnnnnnnnnnnnnnnnnnnnnnnnnnnnnnnnnnnnnnnnnnnnnnnnnnnnnnnnnnnnnnnnnnnnnnnnnnnnnnnnnnnnnnnnnnnnnnnnnnnnnnnnnnnnnnnnnnnnnnnnnnnnnnnnnnnnnnnnnnnnnnnnnnnnnnnnnnnnnnnnnnnnnnnnnnnnnnnnnnnnnnnnnnnnnnnnnnnnnnnnnnnnnnnnnnnnnnnnnnnnnnnnnnnnnnnnnnnnnnnnnnnnnnnnnnnnnnnnnnnnnnnnnnnnnnnnnnnnnnnnnnnnnnnnnnnnnnnnnnnnnnnnnnnnnnnnnnnnnnnnnnnnnnnnnnnnnnnnnnnnnnnnnnnnnnnnnnnnnnnnnnnnnnnnnnnnnnnnnnnnnnnnnnnnnnnnnnnnnnnnnnnnnnnnnnnnnnnnnnnnnnnnnnnnnnnnnnnnnnnnnnnnnnnnnnnnnnnnnnnnnnnnnnnnnnnnnnnnnnnnnnnnnnnnnnnnnnnnnnnnnnnnnnnnnnnnnnnnnnnnnnnnnnnnnnnnnnnnnnnnnnnnnnnnnnnnnnnnnnnnnnnnnnnnnnnnnnnnnnnnnnnnnnnnnnnnnnnnnnnnnnnnnnnnnnnnnnnnnnnnnnnnnnnnnnnnnnnnnnnnnnnnnnnnnnnnnnnnnnnnnnnnnnnnnnnnnnnnnnnnnnnnnnnnnnnnnnnnnnnnnnnnnnnnnnnnnnnnnnnnnnnnnnnnnnnnnnnnnnnnnnnnnnnnnnnnnnnnnnnnnnnnnnnnnnnnnnnnnnnnnnnnnnnnnnnnnnnnnnnnnnnnnnnnnnnnnnnnnnnnnnnnnnnnnnnnnnnnnnnnnnnnnnnnnnnnnnnnnnnnnnnnnnnnnnnnnnnnnnnnnnnnnnnnnnnnnnnnnnnnnnnnnnnnnnnnnnnnnnnnnnnnnnnnnnnnnnnnnnnnnnnnnnnnnnnnnnnnnnnnnnnnnnnnnnnnnnnnnnnnnnnnnnnnnnnnnnnnnnnnnnnnnnnnnnnnnnnnnnnnnnnnnnnnnnnnnnnnnnnnnnnnnnnnnnnnnnnnnnnnnnnnnnnnnnnnnnnnnnnnnnnnnnnnnnnnnnnnnnnnnnnnnnnnnnnnnnnnnnnnnnnnnnnnnnnnnnnnnnnnnnnnnnnnnnnnnnnnnnnnnnnnnnnnnnnnnnnnnnnnnnnnnnnnnnnnnnnnnnnnnnnnnnnnnnnnnnnnnnnnnnnnnnnnnnnnnnnnnnnnnnnnnnnnnnnnnnnnnnnnnnnnnnnnnnnnnnnnnnnnnnnnnnnnnnnnnnnnnnnnnnnnnnnnnnnnnnnnnnnnnnnnnnnnnnnnnnnnnnnnnnnnnnnnnnnnnnnnnnnnnnnnnnnnnnnnnnnnnnnnnnnnnnnnnnnnnnnnnnnnnnnnnnnnnnnnnnnnnnnnnnnnnnnnnnnnnnnnnnnnnnnnnnnnnnnnnnnnnnnnnnnnnnnnnnnnnnnnnnnnnnnnnnnnnnnnnnnnnnnnnnnnnnnnnnnnnnnnnnnnnnnnnnnnnnnnnnnnnnnnnnnnnnnnnnnnnnnnnnnnnnnnnnnnnnnnnnnnnnnnnnnnnnnnnnnnnnnnnnnnnnnnnnnnnnnnnnnnnnnnnnnnnnnnnnnnnnnnnnnnnnnnnnnnnnnnnnnnnnnnnnnnnnnnnnnnnnnnnnnnnnnnnnnnnnnnnnnnnnnnnnnnnnnnnnnnnnnnnnnnnnnnnnnnnnnnnnnnnnnnnnnnnnnnnnnnnnnnnnnnnnnnnnnnnnnnnnnnnnnnnnnnnnnnnnnnnnnnnnnnnnnnnnnnnnnnnnnnnnnnnnnnnnnnnnnnnnnnnnnnnnnnnnnnnnnnnnnnnnnnnnnnnnnnnnnnnnnnnnnnnnnnnnnnnnnnnnnnnnnnnnnnnnnnnnnnnnnnnnnnnnnnnnnnnnnnnnnnnnnnnnnnnnnnnnnnnnnnnnnnnnnnnnnnnnnnnnnnnnnnnnnnnnnnnnnnnnnnnnnnnnnnnnnnnnnnnnnnnnnnnnnnnnnnnnnnnnnnnnnnnnnnnnnnnnnnnnnnnnnnnnnnnnnnnnnnnnnnnnnnnnnnnnnnnnnnnnnnnnnnnnnnnnnnnnnnnnnnnnnnnnnnnnnnnnnnnnnnnnnnnnnnnnnnnnnnnnnnnnnnnnnnnnnnnnnnnnnnnnnnnnnnnnnnnnnnnnnnnnnnnnnnnnnnnnnnnnnnnnnnnnnnnnnnnnnnnnnnnnnnnnnnnnnnnnnnnnnnnnnnnnnnnnnnnnnnnnnnnnnnnnnnnnnnnnnnnnnnnnnnnnnnnnnnnnnnnnnnnnnnnnnnnnnnnnnnnnnnnnnnnnnnnnnnnnnnnnnnnnnnnnnnnnnnnnnnnnnnnnnnnnnnnnnnnnnnnnnnnnnnnnnnnnnnnnnnnnnnnnnnnnnnnnnnnnnnnnnnnnnnnnnnnnnnnnnnnnnnnnnnnnnnnnnnnnnnnnnnnnnnnnnnnnnnnnnnnnnnnnnnnnnnnnnnnnnnnnnnnnnnnnnnnnnnnnnnnnnnnnnnnnnnnnnnnnnnnnnnnnnnnnnnnnnnnnnnnnnnnnnnnnnnnnnnnnnnnnnnnnnnnnnnnnnnnnnnnnnnnnnnnnnnnnnnnnnnnnnnnnnnnnnnnnnnnnnnnnnnnnnnnnnnnnnnnnnnnnnnnnnnnnnnnnnnnnnnnnnnnnnnnnnnnnnnnnnnnnnnnnnnnnnnnnnnnnnnnnnnnnnnnnnnnnnnnnnnnnnnnnnnnnnnnnnnnnnnnnnnnnnnnnnnnnnnnnnnnnnnnnnnnnnnnnnnnnnnnnnnnnnnnnnnnnnnnnnnnnnnnnnnnnnnnnnnnnnnnnnnnnnnnnnnnnnnnnnnnnnnnnnnnnnnnnnnnnnnnnnnnnnnnnnnnnnnnnnnnnnnnnnnnnnnnnnnnnnnnnnnnnnnnnnnnnnnnnnnnnnnnnnnnnnnnnnnnnnnnnnnnnnnnnnnnnnnnnnnnnnnnnnnnnnnnnnnnnnnnnnnnnnnnnnnnnnnnnnnnnnnnnnnnnnnnnnnnnnnnnnnnnnnnnnnnnnnnnnnnnnnnnnnnnnnnnnnnnnnnnnnnnnnnnnnnnnnnnnnnnnnnnnnnnnnnnnnnnnnnnnnnnnnnnnnnnnnnnnnnnnnnnnnnnnnnnnnnnnnnnnnnnnnnnnnnnnnnnnnnnnnnnnnnnnnnnnnnnnnnnnnnnnnnnnnnnnnnnnnnnnnnnnnnnnnnnnnnnnnnnnnnnnnnnnnnnnnnnnnnnnnnnnnnnnnnnnnnnnnnnnnnnnnnnnnnnnnnnnnnnnnnnnnnnnnnnnnnnnnnnnnnnnnnnnnnnnnnnnnnnnnnnnnnnnnnnnnnnnnnnnnnnnnnnnnnnnnnnnnnnnnnnnnnnnnnnnnnnnnnnnnnnnnnnnnnnnnnnnnnnnnnnnnnnnnnnnnnnnnnnnnnnnnnnnnnnnnnnnnnnnnnnnnnnnnnnnnnnnnnnnnnnnnnnnnnnnnnnnnnnnnnnnnnnnnnnnnnnnnnnnnnnnnnnnnnnnnnnnnnnnnnnnnnnnnnnnnnnnnnnnnnnnnnnnnnnnnnnnnnnnnnnnnnnnnnnnnnnnnnnnnnnnnnnnnnnnnnnnnnnnnnnnnnnnnnnnnnnnnnnnnnnnnnnnnnnnnnnnnnnnnnnnnnnnnnnnnnnnnnnnnnnnnnnnnnnnnnnnnnnnnnnnnnnnnnnnnnnnnnnnnnnnnnnnnnnnnnnnnnnnnnnnnnnnnnnnnnnnnnnnnnnnnnnnnnnnnnnnnnnnnnnnnnnnnnnnnnnnnnnnnnnnnnnnnnnnnnnnnnnnnnnnnnnnnnnnnnnnnnnnnnnnnnnnnnnnnnnnnnnnnnnnnnnnnnnnnnnnnnnnnnnnnnnnnnnnnnnnnnnnnnnnnnnnnnnnnnnnnnnnnnnnnnnnnnnnnnnnnnnnnnnnnnnnnnnnnnnnnnnnnnnnnnnnnnnnnnnnnnnnnnnnnnnnnnnnnnnnnnnnnnnnnnnnnnnnnnnnnnnnnnnnnnnnnnnnnnnnnnnnnnnnnnnnnnnnnnnnnnnnnnnnnnnnnnnnnnnnnnnnnnnnnnnnnnnnnnnnnnnnnnnnnnnnnnnnnnnnnnnnnnnnnnnnnnnnnnnnnnnnnnnnnnnnnnnnnnnnnnnnnnnnnnnnnnnnnnnnnnnnnnnnnnnnnnnnnnnnnnnnnnnnnnnnnnnnnnnnnnnnnnnnnnnnnnnnnnnnnnnnnnnnnnnnnnnnnnnnnnnnnnnnnnnnnnnnnnnnnnnnnnnnnnnnnnnnnnnnnnnnnnnnnnnnnnnnnnnnnnnnnnnnnnnnnnnnnnnnnnnnnnnnnnnnnnnnnnnnnnnnnnnnnnnnnnnnnnnnnnnnnnnnnnnnnnnnnnnnnnnnnnnnnnnnnnnnnnnnnnnnnnnnnnnnnnnnnnnnnnnnnnnnnnnnnnnnnnnnnnnnnnnnnnnnnnnnnnnnnnnnnnnnnnnnnnnnnnnnnnnnnnnnnnnnnnnnnnnnnnnnnnnnnnnnnnnnnnnnnnnnnnnnnnnnnnnnnnnnnnnnnnnnnnnnnnnnnnnnnnnnnnnnnnnnnnnnnnnnnnnnnnnnnnnnnnnnnnnnnnnnnnnnnnnnnnnnnnnnnnnnnnnnnnnnnnnnnnnnnnnnnnnnnnnnnnnnnnnnnnnnnnnnnnnnnnnnnnnnnnnnnnnnnnnnnnnnnnnnnnnnnnnnnnnnnnnnnnnnnnnnnnnnnnnnnnnnnnnnnnnnnnnnnnnnnnnnnnnnnnnnnnnnnnnnnnnnnnnnnnnnnnnnnnnnnnnnnnnnnnnnnnnnnnnnnnnnnnnnnnnnnnnnnnnnnnnnnnnnnnnnnnnnnnnnnnnnnnnnnnnnnnnnnnnnnnnnnnnnnnnnnnnnnnnnnnnnnnnnnnnnnnnnnnnnnnnnnnnnnnnnnnnnnnnnnnnnnnnnnnnnnnnnnnnnnnnnnnnnnnnnnnnnnnnnnnnnnnnnnnnnnnnnnnnnnnnnnnnnnnnnnnnnnnnnnnnnnnnnnnnnnnnnnnnnnnnnnnnnnnnnnnnnnnnnnnnnnnnnnnnnnnnnnnnnnnnnnnnnnnnnnnnnnnnnnnnnnnnnnnnnnnnnnnnnnnnnnnnnnnnnnnnnnnnnnnnnnnnnnnnnnnnnnnnnnnnnnnnnnnnnnnnnnnnnnnnnnnnnnnnnnnnnnnnnnnnnnnnnnnnnnnnnnnnnnnnnnnnnnnnnnnnnnnnnnnnnnnnnnnnnnnnnnnnnnnnnnnnnnnnnnnnnnnnnnnnnnnnnnnnnnnnnnnnnnnnnnnnnnnnnnnnnnnnnnnnnnnnnnnnnnnnnnnnnnnnnnnnnnnnnnnnnnnnnnnnnnnnnnnnnnnnnnnnnnnnnnnnnnnnnnnnnnnnnnnnnnnnnnnnnnnnnnnnnnnnnnnnnnnnnnnnnnnnnnnnnnnnnnnnnnnnnnnnnnnnnnnnnnnnnnnnnnnnnnnnnnnnnnnnnnnnnnnnnnnnnnnnnnnnnnnnnnnnnnnnnnnnnnnnnnnnnnnnnnnnnnnnnnnnnnnnnnnnnnnnnnnnnnnnnnnnnnnnnnnnnnnnnnnnnnnnnnnnnnnnnnnnnnnnnnnnnnnnnnnnnnnnnnnnnnnnnnnnnnnnnnnnnnnnnnnnnnnnnnnnnnnnnnnnnnnnnnnnnnnnnnnnnnnnnnnnnnnnnnnnnnnnnnnnnnnnnnnnnnnnnnnnnnnnnnnnnnnnnnnnnnnnnnnnnnnnnnnnnnnnnnnnnnnnnnnnnnnnnnnnnnnnnnnnnnnnnnnnnnnnnnnnnnnnnnnnnnnnnnnnnnnnnnnnnnnnnnnnnnnnnnnnnnnnnnnnnnnnnnnnnnnnnnnnnnnnnnnnnnnnnnnnnnnnnnnnnnnnnnnnnnnnnnnnnnnnnnnnnnnnnnnnnnnnnnnnnnnnnnnnnnnnnnnnnnnnnnnnnnnnnnnnnnnnnnnnnnnnnnnnnnnnnnnnnnnnnnnnnnnnnnnnnnnnnnnnnnnnnnnnnnnnnnnnnnnnnnnnnnnnnnnnnnnnnnnnnnnnnnnnnnnnnnnnnnnnnnnnnnnnnnnnnnnnnnnnnnnnnnnnnnnnnnnnnnnnnnnnnnnnnnnnnnnnnnnnnnnnnnnnnnnnnnnnnnnnnnnnnnnnnnnnnnnnnnnnnnnnnnnnnnnnnnnnnnnnnnnnnnnnnnnnnnnnnnnnnnnnnnnnnnnnnnnnnnnnnnnnnnnnnnnnnnnnnnnnnnnnnnnnnnnnnnnnnnnnnnnnnnnnnnnnnnnnnnnnnnnnnnnnnnnnnnnnnnnnnnnnnnnnnnnnnnnnnnnnnnnnnnnnnnnnnnnnnnnnnnnnnnnnnnnnnnnnnnnnnnnnnnnnnnnnnnnnnnnnnnnnnnnnnnnnnnnnnnnnnnnnnnnnnnnnnnnnnnnnnnnnnnnnnnnnnnnnnnnnnnnnnnnnnnnnnnnnnnnnnnnnnnnnnnnnnnnnnnnnnnnnnnnnnnnnnnnnnnnnnnnnnnnnnnnnnnnnnnnnnnnnnnnnnnnnnnnnnnnnnnnnnnnnnnnnnnnnnnnnnnnnnnnnnnnnnnnnnnnnnnnnnnnnnnnnnnnnnnnnnnnnnnnnnnnnnnnnnnnnnnnnnnnnnnnnnnnnnnnnnnnnnnnnnnnnnnnnnnnnnnnnnnnnnnnnnnnnnnnnnnnnnnnnnnnnnnnnnnnnnnnnnnnnnnnnnnnnnnnnnnnnnnnnnnnnnnnnnnnnnnnnnnnnnnnnnnnnnnnnnnnnnnnnnnnnnnnnnnnnnnnnnnnnnnnnnnnnnnnnnnnnnnnnnnnnnnnnnnnnnnnnnnnnnnnnnnnnnnnnnnnnnnnnnnnnnnnnnnnnnnnnnnnnnnnnnnnnnnnnnnnnnnnnnnnnnnnnnnnnnnnnnnnnnnnnnnnnnnnnnnnnnnnnnnnnnnnnnnnnnnnnnnnnnnnnnnnnnnnnnnnnnnnnnnnnnnnnnnnnnnnnnnnnnnnnnnnnnnnnnnnnnnnnnnnnnnnnnnnnnnnnnnnnnnnnnnnnnnnnnnnnnnnnnnnnnnnnnnnnnnnnnnnnnnnnnnnnnnnnnnnnnnnnnnnnnnnnnnnnnnnnnnnnnnnnnnnnnnnnnnnnnnnnnnnnnnnnnnnnnnnnnnnnnnnnnnnnnnnnnnnnnnnnnnnnnnnnnnnnnnnnnnnnnnnnnnnnnnnnnnnnnnnnnnnnnnnnnnnnnnnnnnnnnnnnnnnnnnnnnnnnnnnnnnnnnnnnnnnnnnnnnnnnnnnnnnnnnnnnnnnnnnnnnnnnnnnnnnnnnnnnnnnnnnnnnnnnnnnnnnnnnnnnnnnnnnnnnnnnnnnnnnnnnnnnnnnnnnnnnnnnnnnnnnnnnnnnnnnnnnnnnnnnnnnnnnnnnnnnnnnnnnnnnnnnnnnnnnnnnnnnnnnnnnnnnnnnnnnnnnnnnnnnnnnnnnnnnnnnnnnnnnnnnnnnnnnnnnnnnnnnnnnnnnnnnnnnnnnnnnnnnnnnnnnnnnnnnnnnnnnnnnnnnnnnnnnnnnnnnnnnnnnnnnnnnnnnnnnnnnnnnnnnnnnnnnnnnnnnnnnnnnnnnnnnnnnnnnnnnnnnnnnnnnnnnnnnnnnnnnnnnnnnnnnnnnnnnnnnnnnnnnnnnnnnnnnnnnnnnnnnnnnnnnnnnnnnnnnnnnnnnnnnnnnnnnnnnnnnnnnnnnnnnnnnnnnnnnnnnnnnnnnnnnnnnnnnnnnnnnnnnnnnnnnnnnnnnnnnnnnnnnnnnnnnnnnnnnnnnnnnnnnnnnnnnnnnnnnnnnnnnnnnnnnnnnnnnnnnnnnnnnnnnnnnnnnnnnnnnnnnnnnnnnnnnnnnnnnnnnnnnnnnnnnnnnnnnnnnnnnnnnnnnnnnnnnnnnnnnnnnnnnnnnnnnnnnnnnnnnnnnnnnnnnnnnnnnnnnnnnnnnnnnnnnnnnnnnnnnnnnnnnnnnnnnnnnnnnnnnnnnnnnnnnnnnnnnnnnnnnnnnnnnnnnnnnnnnnnnnnnnnnnnnnnnnnnnnnnnnnnnnnnnnnnnnnnnnnnnnnnnnnnnnnnnnnnnnnnnnnnnnnnnnnnnnnnnnnnnnnnnnnnnnnnnnnnnnnnnnnnnnnnnnnnnnnnnnnnnnnnnnnnnnnnnnnnnnnnnnnnnnnnnnnnnnnnnnnnnnnnnnnnnnnnnnnnnnnnnnnnnnnnnnnnnnnnnnnnnnnnnnnnnnnnnnnnnnnnnnnnnnnnnnnnnnnnnnnnnnnnnnnnnnnnnnnnnnnnnnnnnnnnnnnnnnnnnnnnnnnnnnnnnnnnnnnnnnnnnnnnnnnnnnnnnnnnnnnnnnnnnnnnnnnnnnnnnnnnnnnnnnnnnnnnnnnnnnnnnnnnnnnnnnnnnnnnnnnnnnnnnnnnnnnnnnnnnnnnnnnnnnnnnnnnnnnnnnnnnnnnnnnnnnnnnnnnnnnnnnnnnnnnnnnnnnnnnnnnnnnnnnnnnnnnnnnnnnnnnnnnnnnnnnnnnnnnnnnnnnnnnnnnnnnnnnnnnnnnnnnnnnnnnnnnnnnnnnnnnnnnnnnnnnnnnnnnnnnnnnnnnnnnnnnnnnnnnnnnnnnnnnnnnnnnnnnnnnnnnnnnnnnnnnnnnnnnnnnnnnnnnnnnnnnnnnnnnnnnnnnnnnnnnnnnnnnnnnnnnnnnnnnnnnnnnnnnnnnnnnnnnnnnnnnnnnnnnnnnnnnnnnnnnnnnnnnnnnnnnnnnnnnnnnnnnnnnnnnnnnnnnnnnnnnnnnnnnnnnnnnnnnnnnnnnnnnnnnnnnnnnnnnnnnnnnnnnnnnnnnnnnnnnnnnnnnnnnnnnnnnnnnnnnnnnnnnnnnnnnnnnnnnnnnnnnnnnnnnnnnnnnnnnnnnnnnnnnnnnnnnnnnnnnnnnnnnnnnnnnnnnnnnnnnnnnnnnnnnnnnnnnnnnnnnnnnnnnnnnnnnnnnnnnnnnnnnnnnnnnnnnnnnnnnnnnnnnnnnnnnnnnnnnnnnnnnnnnnnnnnnnnnnnnnnnnnnnnnnnnnnnnnnnnnnnnnnnnnnnnnnnnnnnnnnnnnnnnnnnnnnnnnnnnnnnnnnnnnnnnnnnnnnnnnnnnnnnnnnnnnnnnnnnnnnnnnnnnnnnnnnnnnnnnnnnnnnnnnnnnnnnnnnnnnnnnnnnnnnnnnnnnnnnnnnnnnnnnnnnnnnnnnnnnnnnnnnnnnnnnnnnnnnnnnnnnnnnnnnnnnnnnnnnnnnnnnnnnnnnnnnnnnnnnnnnnnnnnnnnnnnnnnnnnnnnnnnnnnnnnnnnnnnnnnnnnnnnnnnnnnnnnnnnnnnnnnnnnnnnnnnnnnnnnnnnnnnnnnnnnnnnnnnnnnnnnnnnnnnnnnnnnnnnnnnnnnnnnnnnnnnnnnnnnnnnnnnnnnnnnnnnnnnnnnnnnnnnnnnnnnnnnnnnnnnnnnnnnnnnnnnnnnnnnnnnnnnnnnnnnnnnnnnnnnnnnnnnnnnnnnnnnnnnnnnnnnnnnnnnnnnnnnnnnnnnnnnnnnnnnnnnnnnnnnnnnnnnnnnnnnnnnnnnnnnnnnnnnnnnnnnnnnnnnnnnnnnnnnnnnnnnnnnnnnnnnnnnnnnnnnnnnnnnnnnnnnnnnnnnnnnnnnnnnnnnnnnnnnnnnnnnnnnnnnnnnnnnnnnnnnnnnnnnnnnnnnnnnnnnnnnnnnnnnnnnnnnnnnnnnnnnnnnnnnnnnnnnnnnnnnnnnnnnnnnnnnnnnnnnnnnnnnnnnnnnnnnnnnnnnnnnnnnnnnnnnnnnnnnnnnnnnnnnnnnnnnnnnnnnnnnnnnnnnnnnnnnnnnnnnnnnnnnnnnnnnnnnnnnnnnnnnnnnnnnnnnnnnnnnnnnnnnnnnnnnnnnnnnnnnnnnnnnnnnnnnnnnnnnnnnnnnnnnnnnnnnnnnnnnnnnnnnnnnnnnnnnnnnnnnnnnnnnnnnnnnnnnnnnnnnnnnnnnnnnnnnnnnnnnnnnnnnnnnnnnnnnnnnnnnnnnnnnnnnnnnnnnnnnnnnnnnnnnnnnnnnnnnnnnnnnnnnnnnnnnnnnnnnnnnnnnnnnnnnnnnnnnnnnnnnnnnnnnnnnnnnnnnnnnnnnnnnnnnnnnnnnnnnnnnnnnnnnnnnnnnnnnnnnnnnnnnnnnnnnnnnnnnnnnnnnnnnnnnnnnnnnnnnnnnnnnnnnnnnnnnnnnnnnnnnnnnnnnnnnnnnnnnnnnnnnnnnnnnnnnnnnnnnnnnnnnnnnnnnnnnnnnnnnnnnnnnnnnnnnnnnnnnnnnnnnnnnnnnnnnnnnnnnnnnnnnnnnnnnnnnnnnnnnnnnnnnnnnnnnnnnnnnnnnnnnnnnnnnnnnnnnnnnnnnnnnnnnnnnnnnnnnnnnnnnnnnnnnnnnnnnnnnnnnnnnnnnnnnnnnnnnnnnnnnnnnnnnnnnnnnnnnnnnnnnnnnnnnnnnnnnnnnnnnnnnnnnnnnnnnnnnnnnnnnnnnnnnnnnnnnnnnnnnnnnnnnnnnnnnnnnnnnnnnnnnnnnnnnnnnnnnnnnnnnnnnnnnnnnnnnnnnnnnnnnnnnnnnnnnnnnnnnnnnnnnnnnnnnnnnnnnnnnnnnnnnnnnnnnnnnnnnnnnnnnnnnnnnnnnnnnnnnnnnnnnnnnnnnnnnnnnnnnnnnnnnnnnnnnnnnnnnnnnnnnnnnnnnnnnnnnnnnnnnnnnnnnnnnnnnnnnnnnnnnnnnnnnnnnnnnnnnnnnnnnnnnnnnnnnnnnnnnnnnnnnnnnnnnnnnnnnnnnnnnnnnnnnnnnnnnnnnnnnnnnnnnnnnnnnnnnnnnnnnnnnnnnnnnnnnnnnnnnnnnnnnnnnnnnnnnnnnnnnnnnnnnnnnnnnnnnnnnnnnnnnnnnnnnnnnnnnnnnnnnnnnnnnnnnnnnnnnnnnnnnnnnnnnnnnnnnnnnnnnnnnnnnnnnnnnnnnnnnnnnnnnnnnnnnnnnnnnnnnnnnnnnnnnnnnnnnnnnnnnnnnnnnnnnnnnnnnnnnnnnnnnnnnnnnnnnnnnnnnnnnnnnnnnnnnnnnnnnnnnnnnnnnnnnnnnnnnnnnnnnnnnnnnnnnnnnnnnnnnnnnnnnnnnnnnnnnnnnnnnnnnnnnnnnnnnnnnnnnnnnnnnnnnnnnnnnnnnnnnnnnnnnnnnnnnnnnnnnnnnnnnnnnnnnnnnnnnnnnnnnnnnnnnnnnnnnnnnnnnnnnnnnnnnnnnnnnnnnnnnnnnnnnnnnnnnnnnnnnnnnnnnnnnnnnnnnnnnnnnnnnnnnnnnnnnnnnnnnnnnnnnnnnnnnnnnnnnnnnnnnnnnnnnnnnnnnnnnnnnnnnnnnnnnnnnnnnnnnnnnnnnnnnnnnnnnnnnnnnnnnnnnnnnnnnnnnnnnnnnnnnnnnnnnnnnnnnnnnnnnnnnnnnnnnnnnnnnnnnnnnnnnnnnnnnnnnnnnnnnnnnnnnnnnnnnnnnnnnnnnnnnnnnnnnnnnnnnnnnnnnnnnnnnnnnnnnnnnnnnnnnnnnnnnnnnnnnnnnnnnnnnnnnnnnnnnnnnnnnnnnnnnnnnnnnnnnnnnnnnnnnnnnnnnnnnnnnnnnnnnnnnnnnnnnnnnnnnnnnnnnnnnnnnnnnnnnnnnnnnnnnnnnnnnnnnnnnnnnnnnnnnnnnnnnnnnnnnnnnnnnnnnnnnnnnnnnnnnnnnnnnnnnnnnnnnnnnnnnnnnnnnnnnnnnnnnnnnnnnnnnnnnnnnnnnnnnnnnnnnnnnnnnnnnnnnnnnnnnnnnnnnnnnnnnnnnnnnnnnnnnnnnnnnnnnnnnnnnnnnnnnnnnnnnnnnnnnnnnnnnnnnnnnnnnnnnnnnnnnnnnnnnnnnnnnnnnnnnnnnnnnnnnnnnnnnnnnnnnnnnnnnnnnnnnnnnnnnnnnnnnnnnnnnnnnnnnnnnnnnnnnnnnnnnnnnnnnnnnnnnnnnnnnnnnnnnnnnnnnnnnnnnnnnnnnnnnnnnnnnnnnnnnnnnnnnnnnnnnnnnnnnnnnnnnnnnnnnnnnnnnnnnnnnnnnnnnnnnnnnnnnnnnnnnnnnnnnnnnnnnnnnnnnnnnnnnnnnnnnnnnnnnnnnnnnnnnnnnnnnnnnnnnnnnnnnnnnnnnnnnnnnnnnnnnnnnnnnnnnnnnnnnnnnnnnnnnnnnnnnnnnnnnnnnnnnnnnnnnnnnnnnnnnnnnnnnnnnnnnnnnnnnnnnnnnnnnnnnnnnnnnnnnnnnnnnnnnnnnnnnnnnnnnnnnnnnnnnnnnnnnnnnnnnnnnnnnnnnnnnnnnnnnnnnnnnnnnnnnnnnnnnnnnnnnnnnnnnnnnnnnnnnnnnnnnnnnnnnnnnnnnnnnnnnnnnnnnnnnnnnnnnnnnnnnnnnnnnnnnnnnnnnnnnnnnnnnnnnnnnnnnnnnnnnnnnnnnnnnnnnnnnnnnnnnnnnnnnnnnnnnnnnnnnnnnnnnnnnnnnnnnnnnnnnnnnnnnnnnnnnnnnnnnnnnnnnnnnnnnnnnnnnnnnnnnnnnnnnnnnnnnnnnnnnnnnnnnnnnnnnnnnnnnnnnnnnnnnnnnnnnnnnnnnnnnnnnnnnnnnnnnnnnnnnnnnnnnnnnnnnnnnnnnnnnnnnnnnnnnnnnnnnnnnnnnnnnnnnnnnnnnnnnnnnnnnnnnnnnnnnnnnnnnnnnnnnnnnnnnnnnnnnnnnnnnnnnnnnnnnnnnnnnnnnnnnnnnnnnnnnnnnnnnnnnnnnnnnnnnnnnnnnnnnnnnnnnnnnnnnnnnnnnnnnnnnnnnnnnnnnnnnnnnnnnnnnnnnnnnnnnnnnnnnnnnnnnnnnnnnnnnnnnnnnnnnnnnnnnnnnnnnnnnnnnnnnnnnnnnnnnnnnnnnnnnnnnnnnnnnnnnnnnnnnnnnnnnnnnnnnnnnnnnnnnnnnnnnnnnnnnnnnnnnnnnnnnnnnnnnnnnnnnnnnnnnnnnnnnnnnnnnnnnnnnnnnnnnnnnnnnnnnnnnnnnnnnnnnnnnnnnnnnnnnnnnnnnnnnnnnnnnnnnnnnnnnnnnnnnnnnnnnnnnnnnnnnnnnnnnnnnnnnnnnnnnnnnnnnnnnnnnnnnnnnnnnnnnnnnnnnnnnnnnnnnnnnnnnnnnnnnnnnnnnnnnnnnnnnnnnnnnnnnnnnnnnnnnnnnnnnnnnnnnnnnnnnnnnnnnnnnnnnnnnnnnnnnnnnnnnnnnnnnnnnnnnnnnnnnnnnnnnnnnnnnnnnnnnnnnnnnnnnnnnnnnnnnnnnnnnnnnnnnnnnnnnnnnnnnnnnnnnnnnnnnnnnnnnnnnnnnnnnnnnnnnnnnnnnnnnnnnnnnnnnnnnnnnnnnnnnnnnnnnnnnnnnnnnnnnnnnnnnnnnnnnnnnnnnnnnnnnnnnnnnnnnnnnnnnnnnnnnnnnnnnnnnnnnnnnnnnnnnnnnnnnnnnnnnnnnnnnnnnnnnnnnnnnnnnnnnnnnnnnnnnnnnnnnnnnnnnnnnnnnnnnnnnnnnnnnnnnnnnnnnnnnnnnnnnnnnnnnnnnnnnnnnnnnnnnnnnnnnnnnnnnnnnnnnnnnnnnnnnnnnnnnnnnnnnnnnnnnnnnnnnnnnnnnnnnnnnnnnnnnnnnnnnnnnnnnnnnnnnnnnnnnnnnnnnnnnnnnnnnnnnnnnnnnnnnnnnnnnnnnnnnnnnnnnnnnnnnnnnnnnnnnnnnnnnnnnnnnnnnnnnnnnnnnnnnnnnnnnnnnnnnnnnnnnnnnnnnnnnnnnnnnnnnnnnnnnnnnnnnnnnnnnnnnnnnnnnnnnnnnnnnnnnnnnnnnnnnnnnnnnnnnnnnnnnnnnnnnnnnnnnnnnnnnnnnnnnnnnnnnnnnnnnnnnnnnnnnnnnnnnnnnnnnnnnnnnnnnnnnnnnnnnnnnnnnnnnnnnnnnnnnnnnnnnnnnnnnnnnnnnnnnnnnnnnnnnnnnnnnnnnnnnnnnnnnnnnnnnnnnnnnnnnnnnnnnnnnnnnnnnnnnnnnnnnnnnnnnnnnnnnnnnnnnnnnnnnnnnnnnnnnnnnnnnnnnnnnnnnnnnnnnnnnnnnnnnnnnnnnnnnnnnnnnnnnnnnnnnnnnnnnnnnnnnnnnnnnnnnnnnnnnnnnnnnnnnnnnnnnnnnnnnnnnnnnnnnnnnnnnnnnnnnnnnnnnnnnnnnnnnnnnnnnnnnnnnnnnnnnnnnnnnnnnnnnnnnnnnnnnnnnnnnnnnnnnnnnnnnnnnnnnnnnnnnnnnnnnnnnnnnnnnnnnnnnnnnnnnnnnnnnnnnnnnnnnnnnnnnnnnnnnnnnnnnnnnnnnnnnnnnnnnnnnnnnnnnnnnnnnnnnnnnnnnnnnnnnnnnnnnnnnnnnnnnnnnnnnnnnnnnnnnnnnnnnnnnnnnnnnnnnnnnnnnnnnnnnnnnnnnnnnnnnnnnnnnnnnnnnnnnnnnnnnnnnnnnnnnnnnnnnnnnnnnnnnnnnnnnnnnnnnnnnnnnnnnnnnnnnnnnnnnnnnnnnnnnnnnnnnnnnnnnnnnnnnnnnnnnnnnnnnnnnnnnnnnnnnnnnnnnnnnnnnnnnnnnnnnnnnnnnnnnnnnnnnnnnnnnnnnnnnnnnnnnnnnnnnnnnnnnnnnnnnnnnnnnnnnnnnnnnnnnnnnnnnnnnnnnnnnnnnnnnnnnnnnnnnnnnnnnnnnnnnnnnnnnnnnnnnnnnnnnnnnnnnnnnnnnnnnnnnnnnnnnnnnnnnnnnnnnnnnnnnnnnnnnnnnnnnnnnnnnnnnnnnnnnnnnnnnnnnnnnnnnnnnnnnnnnnnnnnnnnnnnnnnnnnnnnnnnnnnnnnnnnnnnnnnnnnnnnnnnnnnnnnnnnnnnnnnnnnnnnnnnnnnnnnnnnnnnnnnnnnnnnnnnnnnnnnnnnnnnnnnnnnnnnnnnnnnnnnnnnnnnnnnnnnnnnnnnnnnnnnnnnnnnnnnnnnnnnnnnnnnnnnnnnnnnnnnnnnnnnnnnnnnnnnnnnnnnnnnnnnnnnnnnnnnnnnnnnnnnnnnnnnnnnnnnnnnnnnnnnnnnnnnnnnnnnnnnnnnnnnnnnnnnnnnnnnnnnnnnnnnnnnnnnnnnnnnnnnnnnnnnnnnnnnnnnnnnnnnnnnnnnnnnnnnnnnnnnnnnnnnnnnnnnnnnnnnnnnnnnnnnnnnnnnnnnnnnnnnnnnnnnnnnnnnnnnnnnnnnnnnnnnnnnnnnnnnnnnnnnnnnnnnnnnnnnnnnnnnnnnnnnnnnnnnnnnnnnnnnnnnnnnnnnnnnnnnnnnnnnnnnnnnnnnnnnnnnnnnnnnnnnnnnnnnnnnnnnnnnnnnnnnnnnnnnnnnnnnnnnnnnnnnnnnnnnnnnnnnnnnnnnnnnnnnnnnnnnnnnnnnnnnnnnnnnnnnnnnnnnnnnnnnnnnnnnnnnnnnnnnnnnnnnnnnnnnnnnnnnnnnnnnnnnnnnnnnnnnnnnnnnnnnnnnnnnnnnnnnnnnnnnnnnnnnnnnnnnnnnnnnnnnnnnnnnnnnnnnnnnnnnnnnnnnnnnnnnnnnnnnnnnnnnnnnnnnnnnnnnnnnnnnnnnnnnnnnnnnnnnnnnnnnnnnnnnnnnnnnnnnnnnnnnnnnnnnnnnnnnnnnnnnnnnnnnnnnnnnnnnnnnnnnnnnnnnnnnnnnnnnnnnnnnnnnnnnnnnnnnnnnnnnnnnnnnnnnnnnnnnnnnnnnnnnnnnnnnnnnnnnnnnnnnnnnnnnnnnnnnnnnnnnnnnnnnnnnnnnnnnnnnnnnnnnnnnnnnnnnnnnnnnnnnnnnnnnnnnnnnnnnnnnnnnnnnnnnnnnnnnnnnnnnnnnnnnnnnnnnnnnnnnnnnnnnnnnnnnnnnnnnnnnnnnnnnnnnnnnnnnnnnnnnnnnnnnnnnnnnnnnnnnnnnnnnnnnnnnnnnnnnnnnnnnnnnnnnnnnnnnnnnnnnnnnnnnnnnnnnnnnnnnnnnnnnnnnnnnnnnnnnnnnnnnnnnnnnnnnnnnnnnnnnnnnnnnnnnnnnnnnnnnnnnnnnnnnnnnnnnnnnnnnnnnnnnnnnnnnnnnnnnnnnnnnnnnnnnnnnnnnnnnnnnnnnnnnnnnnnnnnnnnnnnnnnnnnnnnnnnnnnnnnnnnnnnnnnnnnnnnnnnnnnnnnnnnnnnnnnnnnnnnnnnnnnnnnnnnnnnnnnnnnnnnnnnnnnnnnnnnnnnnnnnnnnnnnnnnnnnnnnnnnnnnnnnnnnnnnnnnnnnnnnnnnnnnnnnnnnnnnnnnnnnnnnnnnnnnnnnnnnnnnnnnnnnnnnnnnnnnnnnnnnnnnnnnnnnnnnnnnnnnnnnnnnnnnnnnnnnnnnnnnnnnnnnnnnnnnnnnnnnnnnnnnnnnnnnnnnnnnnnnnnnnnnnnnnnnnnnnnnnnnnnnnnnnnnnnnnnnnnnnnnnnnnnnnnnnnnnnnnnnnnnnnnnnnnnnnnnnnnnnnnnnnnnnnnnnnnnnnnnnnnnnnnnnnnnnnnnnnnnnnnnnnnnnnnnnnnnnnnnnnnnnnnnnnnnnnnnnnnnnnnnnnnnnnnnnnnnnnnnnnnnnnnnnnnnnnnnnnnnnnnnnnnnnnnnnnnnnnnnnnnnnnnnnnnnnnnnnnnnnnnnnnnnnnnnnnnnnnnnnnnnnnnnnnnnnnnnnnnnnnnnnnnnnnnnnnnnnnnnnnnnnnnnnnnnnnnnnnnnnnnnnnnnnnnnnnnnnnnnnnnnnnnnnnnnnnnnnnnnnnnnnnnnnnnnnnnnnnnnnnnnnnnnnnnnnnnnnnnnnnnnnnnnnnnnnnnnnnnnnnnnnnnnnnnnnnnnnnnnnnnnnnnnnnnnnnnnnnnnnnnnnnnnnnnnnnnnnnnnnnnnnnnnnnnnnnnnnnnnnnnnnnnnnnnnnnnnnnnnnnnnnnnnnnnnnnnnnnnnnnnnnnnnnnnnnnnnnnnnnnnnnnnnnnnnnnnnnnnnnnnnnnnnnnnnnnnnnnnnnnnnnnnnnnnnnnnnnnnnnnnnnnnnnnnnnnnnnnnnnnnnnnnnnnnnnnnnnnnnnnnnnnnnnnnnnnnnnnnnnnnnnnnnnnnnnnnnnnnnnnnnnnnnnnnnnnnnnnnnnnnnnnnnnnnnnnnnnnnnnnnnnnnnnnnnnnnnnnnnnnnnnnnnnnnnnnnnnnnnnnnnnnnnnnnnnnnnnnnnnnnnnnnnnnnnnnnnnnnnnnnnnnnnnnnnnnnnnnnnnnnnnnnnnnnnnnnnnnnnnnnnnnnnnnnnnnnnnnnnnnnnnnnnnnnnnnnnnnnnnnnnnnnnnnnnnnnnnnnnnnnnnnnnnnnnnnnnnnnnnnnnnnnnnnnnnnnnnnnnnnnnnnnnnnnnnnnnnnnnnnnnnnnnnnnnnnnnnnnnnnnnnnnnnnnnnnnnnnnnnnnnnnnnnnnnnnnnnnnnnnnnnnnnnnnnnnnnnnnnnnnnnnnnnnnnnnnnnnnnnnnnnnnnnnnnnnnnnnnnnnnnnnnnnnnnnnnnnnnnnnnnnnnnnnnnnnnnnnnnnnnnnnnnnnnnnnnnnnnnnnnnnnnnnnnnnnnnnnnnnnnnnnnnnnnnnnnnnnnnnnnnnnnnnnnnnnnnnnnnnnnnnnnnnnnnnnnnnnnnnnnnnnnnnnnnnnnnnnnnnnnnnnnnnnnnnnnnnnnnnnnnnnnnnnnnnnnnnnnnnnnnnnnnnnnnnnnnnnnnnnnnnnnnnnnnnnnnnnnnnnnnnnnnnnnnnnnnnnnnnnnnnnnnnnnnnnnnnnnnnnnnnnnnnnnnnnnnnnnnnnnnnnnnnnnnnnnnnnnnnnnnnnnnnnnnnnnnnnnnnnnnnnnnnnnnnnnnnnnnnnnnnnnnnnnnnnnnnnnnnnnnnnnnnnnnnnnnnnnnnnnnnnnnnnnnnnnnnnnnnnnnnnnnnnnnnnnnnnnnnnnnnnnnnnnnnnnnnnnnnnnnnnnnnnnnnnnnnnnnnnnnnnnnnnnnnnnnnnnnnnnnnnnnnnnnnnnnnnnnnnnnnnnnnnnnnnnnnnnnnnnnnnnnnnnnnnnnnnnnnnnnnnnnnnnnnnnnnnnnnnnnnnnnnnnnnnnnnnnnnnnnnnnnnnnnnnnnnnnnnnnnnnnnnnnnnnnnnnnnnnnnnnnnnnnnnnnnnnnnnnnnnnnnnnnnnnnnnnnnnnnnnnnnnnnnnnnnnnnnnnnnnnnnnnnnnnnnnnnnnnnnnnnnnnnnnnnnnnnnnnnnnnnnnnnnnnnnnnnnnnnnnnnnnnnnnnnnnnnnnnnnnnnnnnnnnnnnnnnnnnnnnnnnnnnnnnnnnnnnnnnnnnnnnnnnnnnnnnnnnnnnnnnnnnnnnnnnnnnnnnnnnnnnnnnnnnnnnnnnnnnnnnnnnnnnnnnnnnnnnnnnnnnnnnnnnnnnnnnnnnnnnnnnnnnnnnnnnnnnnnnnnnnnnnnnnnnnnnnnnnnnnnnnnnnnnnnnnnnnnnnnnnnnnnnnnnnnnnnnnnnnnnnnnnnnnnnnnnnnnnnnnnnnnnnnnnnnnnnnnnnnnnnnnnnnnnnnnnnnnnnnnnnnnnnnnnnnnnnnnnnnnnnnnnnnnnnnnnnnnnnnnnnnnnnnnnnnnnnnnnnnnnnnnnnnnnnnnnnnnnnnnnnnnnnnnnnnnnnnnnnnnnnnnnnnnnnnnnnnnnnnnnnnnnnnnnnnnnnnnnnnnnnnnnnnnnnnnnnnnnnnnnnnnnnnnnnnnnnnnnnnnnnnnnnnnnnnnnnnnnnnnnnnnnnnnnnnnnnnnnnnnnnnnnnnnnnnnnnnnnnnnnnnnnnnnnnnnnnnnnnnnnnnnnnnnnnnnnnnnnnnnnnnnnnnnnnnnnnnnnnnnnnnnnnnnnnnnnnnnnnnnnnnnnnnnnnnnnnnnnnnnnnnnnnnnnnnnnnnnnnnnnnnnnnnnnnnnnnnnnnnnnnnnnnnnnnnnnnnnnnnnnnnnnnnnnnnnnnnnnnnnnnnnnnnnnnnnnnnnnnnnnnnnnnnnnnnnnnnnnnnnnnnnnnnnnnnnnnnnnnnnnnnnnnnnnnnnnnnnnnnnnnnnnnnnnnnnnnnnnnnnnnnnnnnnnnnnnnnnnnnnnnnnnnnnnnnnnnnnnnnnnnnnnnnnnnnnnnnnnnnnnnnnnnnnnnnnnnnnnnnnnnnnnnnnnnnnnnnnnnnnnnnnnnnnnnnnnnnnnnnnnnnnnnnnnnnnnnnnnnnnnnnnnnnnnnnnnnnnnnnnnnnnnnnnnnnnnnnnnnnnnnnnnnnnnnnnnnnnnnnnnnnnnnnnnnnnnnnnnnnnnnnnnnnnnnnnnnnnnnnnnnnnnnnnnnnnnnnnnnnnnnnnnnnnnnnnnnnnnnnnnnnnnnnnnnnnnnnnnnnnnnnnnnnnnnnnnnnnnnnnnnnnnnnnnnnnnnnnnnnnnnnnnnnnnnnnnnnnnnnnnnnnnnnnnnnnnnnnnnnnnnnnnnnnnnnnnnnnnnnnnnnnnnnnnnnnnnnnnnnnnnnnnnnnnnnnnnnnnnnnnnnnnnnnnnnnnnnnnnnnnnnnnnnnnnnnnnnnnnnnnnnnnnnnnnnnnnnnnnnnnnnnnnnnnnnnnnnnnnnnnnnnnnnnnnnnnnnnnnnnnnnnnnnnnnnnnnnnnnnnnnnnnnnnnnnnnnnnnnnnnnnnnnnnnnnnnnnnnnnnnnnnnnnnnnnnnnnnnnnnnnnnnnnnnnnnnnnnnnnnnnnnnnnnnnnnnnnnnnnnnnnnnnnnnnnnnnnnnnnnnnnnnnnnnnnnnnnnnnnnnnnnnnnnnnnnnnnnnnnnnnnnnnnnnnnnnnnnnnnnnnnnnnnnnnnnnnnnnnnnnnnnnnnnnnnnnnnnnnnnnnnnnnnnnnnnnnnnnnnnnnnnnnnnnnnnnnnnnnnnnnnnnnnnnnnnnnnnnnnnnnnnnnnnnnnnnnnnnnnnnnnnnnnnnnnnnnnnnnnnnnnnnnnnnnnnnnnnnnnnnnnnnnnnnnnnnnnnnnnnnnnnnnnnnnnnnnnnnnnnnnnnnnnnnnnnnnnnnnnnnnnnnnnnnnnnnnnnnnnnnnnnnnnnnnnnnnnnnnnnnnnnnnnnnnnnnnnnnnnnnnnnnnnnnnnnnnnnnnnnnnnnnnnnnnnnnnnnnnnnnnnnnnnnnnnnnnnnnnnnnnnnnnnnnnnnnnnnnnnnnnnnnnnnnnnnnnnnnnnnnnnnnnnnnnnnnnnnnnnnnnnnnnnnnnnnnnnnnnnnnnnnnnnnnnnnnnnnnnnnnnnnnnnnnnnnnnnnnnnnnnnnnnnnnnnnnnnnnnnnnnnnnnnnnnnnnnnnnnnnnnnnnnnnnnnnnnnnnnnnnnnnnnnnnnnnnnnnnnnnnnnnnnnnnnnnnnnnnnnnnnnnnnnnnnnnnnnnnnnnnnnnnnnnnnnnnnnnnnnnnnnnnnnnnnnnnnnnnnnnnnnnnnnnnnnnnnnnnnnnnnnnnnnnnnnnnnnnnnnnnnnnnnnnnnnnnnnnnnnnnnnnnnnnnnnnnnnnnnnnnnnnnnnnnnnnnnnnnnnnnnnnnnnnnnnnnnnnnnnnnnnnnnnnnnnnnnnnnnnnnnnnnnnnnnnnnnnnnnnnnnnnnnnnnnnnnnnnnnnnnnnnnnnnnnnnnnnnnnnnnnnnnnnnnnnnnnnnnnnnnnnnnnnnnnnnnnnnnnnnnnnnnnnnnnnnnnnnnnnnnnnnnnnnnnnnnnnnnnnnnnnnnnnnnnnnnnnnnnnnnnnnnnnnnnnnnnnnnnnnnnnnnnnnnnnnnnnnnnnnnnnnnnnnnnnnnnnnnnnnnnnnnnnnnnnnnnnnnnnnnnnnnnnnnnnnnnnnnnnnnnnnnnnnnnnnnnnnnnnnnnnnnnnnnnnnnnnnnnnnnnnnnnnnnnnnnnnnnnnnnnnnnnnnnnnnnnnnnnnnnnnnnnnnnnnnnnnnnnnnnnnnnnnnnnnnnnnnnnnnnnnnnnnnnnnnnnnnnnnnnnnnnnnnnnnnnnnnnnnnnnnnnnnnnnnnnnnnnnnnnnnnnnnnnnnnnnnnnnnnnnnnnnnnnnnnnnnnnnnnnnnnnnnnnnnnnnnnnnnnnnnnnnnnnnnnnnnnnnnnnnnnnnnnnnnnnnnnnnnnnnnnnnnnnnnnnnnnnnnnnnnnnnnnnnnnnnnnnnnnnnnnnnnnnnnnnnnnnnnnnnnnnnnnnnnnnnnnnnnnnnnnnnnnnnnnnnnnnnnnnnnnnnnnnnnnnnnnnnnnnnnnnnnnnnnnnnnnnnnnnnnnnnnnnnnnnnnnnnnnnnnnnnnnnnnnnnnnnnnnnnnnnnnnnnnnnnnnnnnnnnnnnnnnnnnnnnnnnnnnnnnnnnnnnnnnnnnnnnnnnnnnnnnnnnnnnnnnnnnnnnnnnnnnnnnnnnnnnnnnnnnnnnnnnnnnnnnnnnnnnnnnnnnnnnnnnnnnnnnnnnnnnnnnnnnnnnnnnnnnnnnnnnnnnnnnnnnnnnnnnnnnnnnnnnnnnnnnnnnnnnnnnnnnnnnnnnnnnnnnnnnnnnnnnnnnnnnnnnnnnnnnnnnnnnnnnnnnnnnnnnnnnnnnnnnnnnnnnnnnnnnnnnnnnnnnnnnnnnnnnnnnnnnnnnnnnnnnnnnnnnnnnnnnnnnnnnnnnnnnnnnnnnnnnnnnnnnnnnnnnnnnnnnnnnnnnnnnnnnnnnnnnnnnnnnnnnnnnnnnnnnnnnnnnnnnnnnnnnnnnnnnnnnnnnnnnnnnnnnnnnnnnnnnnnnnnnnnnnnnnnnnnnnnnnnnnnnnnnnnnnnnnnnnnnnnnnnnnnnnnnnnnnnnnnnnnnnnnnnnnnnnnnnnnnnnnnnnnnnnnnnnnnnnnnnnnnnnnnnnnnnnnnnnnnnnnnnnnnnnnnnnnnnnnnnnnnnnnnnnnnnnnnnnnnnnnnnnnnnnnnnnnnnnnnnnnnnnnnnnnnnnnnnnnnnnnnnnnnnnnnnnnnnnnnnnnnnnnnnnnnnnnnnnnnnnnnnnnnnnnnnnnnnnnnnnnnnnnnnnnnnnnnnnnnnnnnnnnnnnnnnnnnnnnnnnnnnnnnnnnnnnnnnnnnnnnnnnnnnnnnnnnnnnnnnnnnnnnnnnnnnnnnnnnnnnnnnnnnnnnnnnnnnnnnnnnnnnnnnnnnnnnnnnnnnnnnnnnnnnnnnnnnnnnnnnnnnnnnnnnnnnnnnnnnnnnnnnnnnnnnnnnnnnnnnnnnnnnnnnnnnnnnnnnnnnnnnnnnnnnnnnnnnnnnnnnnnnnnnnnnnnnnnnnnnnnnnnnnnnnnnnnnnnnnnnnnnnnnnnnnnnnnnnnnnnnnnnnnnnnnnnnnnnnnnnnnnnnnnnnnnnnnnnnnnnnnnnnnnnnnnnnnnnnnnnnnnnnnnnnnnnnnnnnnnnnnnnnnnnnnnnnnnnnnnnnnnnnnnnnnnnnnnnnnnnnnnnnnnnnnnnnnnnnnnnnnnnnnnnnnnnnnnnnnnnnnnnnnnnnnnnnnnnnnnnnnnnnnnnnnnnnnnnnnnnnnnnnnnnnnnnnnnnnnnnnnnnnnnnnnnnnnnnnnnnnnnnnnnnnnnnnnnnnnnnnnnnnnnnnnnnnnnnnnnnnnnnnnnnnnnnnnnnnnnnnnnnnnnnnnnnnnnnnnnnnnnnnnnnnnnnnnnnnnnnnnnnnnnnnnnnnnnnnnnnnnnnnnnnnnnnnnnnnnnnnnnnnnnnnnnnnnnnnnnnnnnnnnnnnnnnnnnnnnnnnnnnnnnnnnnnnnnnnnnnnnnnnnnnnnnnnnnnnnnnnnnnnnnnnnnnnnnnnnnnnnnnnnnnnnnnnnnnnnnnnnnnnnnnnnnnnnnnnnnnnnnnnnnnnnnnnnnnnnnnnnnnnnnnnnnnnnnnnnnnnnnnnnnnnnnnnnnnnnnnnnnnnnnnnnnnnnnnnnnnnnnnnnnnnnnnnnnnnnnnnnnnnnnnnnnnnnnnnnnnnnnnnnnnnnnnnnnnnnnnnnnnnnnnnnnnnnnnnnnnnnnnnnnnnnnnnnnnnnnnnnnnnnnnnnnnnnnnnnnnnnnnnnnnnnnnnnnnnnnnnnnnnnnnnnnnnnnnnnnnnnnnnnnnnnnnnnnnnnnnnnnnnnnnnnnnnnnnnnnnnnnnnnnnnnnnnnnnnnnnnnnnnnnnnnnnnnnnnnnnnnnnnnnnnnnnnnnnnnnnnnnnnnnnnnnnnnnnnnnnnnnnnnnnnnnnnnnnnnnnnnnnnnnnnnnnnnnnnnnnnnnnnnnnnnnnnnnnnnnnnnnnnnnnnnnnnnnnnnnnnnnnnnnnnnnnnnnnnnnnnnnnnnnnnnnnnnnnnnnnnnnnnnnnnnnnnnnnnnnnnnnnnnnnnnnnnnnnnnnnnnnnnnnnnnnnnnnnnnnnnnnnnnnnnnnnnnnnnnnnnnnnnnnnnnnnnnnnnnnnnnnnnnnnnnnnnnnnnnnnnnnnnnnnnnnnnnnnnnnnnnnnnnnnnnnnnnnnnnnnnnnnnnnnnnnnnnnnnnnnnnnnnnnnnnnnnnnnnnnnnnnnnnnnnnnnnnnnnnnnnnnnnnnnnnnnnnnnnnnnnnnnnnnnnnnnnnnnnnnnnnnnnnnnnnnnnnnnnnnnnnnnnnnnnnnnnnnnnnnnnnnnnnnnnnnnnnnnnnnnnnnnnnnnnnnnnnnnnnnnnnnnnnnnnnnnnnnnnnnnnnnnnnnnnnnnnnnnnnnnnnnnnnnnnnnnnnnnnnnnnnnnnnnnnnnnnnnnnnnnnnnnnnnnnnnnnnnnnnnnnnnnnnnnnnnnnnnnnnnnnnnnnnnnnnnnnnnnnnnnnnnnnnnnnnnnnnnnnnnnnnnnnnnnnnnnnnnnnnnnnnnnnnnnnnnnnnnnnnnnnnnnnnnnnnnnnnnnnnnnnnnnnnnnnnnnnnnnnnnnnnnnnnnnnnnnnnnnnnnnnnnnnnnnnnnnnnnnnnnnnnnnnnnnnnnnnnnnnnnnnnnnnnnnnnnnnnnnnnnnnnnnnnnnnnnnnnnnnnnnnnnnnnnnnnnnnnnnnnnnnnnnnnnnnnnnnnnnnnnnnnnnnnnnnnnnnnnnnnnnnnnnnnnnnnnnnnnnnnnnnnnnnnnnnnnnnnnnnnnnnnnnnnnnnnnnnnnnnnnnnnnnnnnnnnnnnnnnnnnnnnnnnnnnnnnnnnnnnnnnnnnnnnnnnnnnnnnnnnnnnnnnnnnnnnnnnnnnnnnnnnnnnnnnnnnnnnnnnnnnnnnnnnnnnnnnnnnnnnnnnnnnnnnnnnnnnnnnnnnnnnnnnnnnnnnnnnnnnnnnnnnnnnnnnnnnnnnnnnnnnnnnnnnnnnnnnnnnnnnnnnnnnnnnnnnnnnnnnnnnnnnnnnnnnnnnnnnnnnnnnnnnnnnnnnnnnnnnnnnnnnnnnnnnnnnnnnnnnnnnnnnnnnnnnnnnnnnnnnnnnnnnnnnnnnnnnnnnnnnnnnnnnnnnnnnnnnnnnnnnnnnnnnnnnnnnnnnnnnnnnnnnnnnnnnnnnnnnnnnnnnnnnnnnnnnnnnnnnnnnnnnnnnnnnnnnnnnnnnnnnnnnnnnnnnnnnnnnnnnnnnnnnnnnnnnnnnnnnnnnnnnnnnnnnnnnnnnnnnnnnnnnnnnnnnnnnnnnnnnnnnnnnnnnnnnnnnnnnnnnnnnnnnnnnnnnnnnnnnnnnnnnnnnnnnnnnnnnnnnnnnnnnnnnnnnnnnnnnnnnnnnnnnnnnnnnnnnnnnnnnnnnnnnnnnnnnnnnnnnnnnnnnnnnnnnnnnnnnnnnnnnnnnnnnnnnnnnnnnnnnnnnnnnnnnnnnnnnnnnnnnnnnnnnnnnnnnnnnnnnnnnnnnnnnnnnnnnnnnnnnnnnnnnnnnnnnnnnnnnnnnnnnnnnnnnnnnnnnnnnnnnnnnnnnnnnnnnnnnnnnnnnnnnnnnnnnnnnnnnnnnnnnnnnnnnnnnnnnnnnnnnnnnnnnnnnnnnnnnnnnnnnnnnnnnnnnnnnnnnnnnnnnnnnnnnnnnnnnnnnnnnnnnnnnnnnnnnnnnnnnnnnnnnnnnnnnnnnnnnnnnnnnnnnnnnnnnnnnnnnnnnnnnnnnnnnnnnnnnnnnnnnnnnnnnnnnnnnnnnnnnnnnnnnnnnnnnnnnnnnnnnnnnnnnnnnnnnnnnnnnnnnnnnnnnnnnnnnnnnnnnnnnnnnnnnnnnnnnnnnnnnnnnnnnnnnnnnnnnnnnnnnnnnnnnnnnnnnnnnnnnnnnnnnnnnnnnnnnnnnnnnnnnnnnnnnnnnnnnnnnnnnnnnnnnnnnnnnnnnnnnnnnnnnnnnnnnnnnnnnnnnnnnnnnnnnnnnnnnnnnnnnnnnnnnnnnnnnnnnnnnnnnnnnnnnnnnnnnnnnnnnnnnnnnnnnnnnnnnnnnnnnnnnnnnnnnnnnnnnnnnnnnnnnnnnnnnnnnnnnnnnnnnnnnnnnnnnnnnnnnnnnnnnnnnnnnnnnnnnnnnnnnnnnnnnnnnnnnnnnnnnnnnnnnnnnnnnnnnnnnnnnnnnnnnnnnnnnnnnnnnnnnnnnnnnnnnnnnnnnnnnnnnnnnnnnnnnnnnnnnnnnnnnnnnnnnnnnnnnnnnnnnnnnnnnnnnnnnnnnnnnnnnnnnnnnnnnnnnnnnnnnnnnnnnnnnnnnnnnnnnnnnnnnnnnnnnnnnnnnnnnnnnnnnnnnnnnnnnnnnnnnnnnnnnnnnnnnnnnnnnnnnnnnnnnnnnnnnnnnnnnnnnnnnnnnnnnnnnnnnnnnnnnnnnnnnnnnnnnnnnnnnnnnnnnnnnnnnnnnnnnnnnnnnnnnnnnnnnnnnnnnnnnnnnnnnnnnnnnnnnnnnnnnnnnnnnnnnnnnnnnnnnnnnnnnnnnnnnnnnnnnnnnnnnnnnnnnnnnnnnnnnnnnnnnnnnnnnnnnnnnnnnnnnnnnnnnnnnnnnnnnnnnnnnnnnnnnnnnnnnnnnnnnnnnnnnnnnnnnnnnnnnnnnnnnnnnnnnnnnnnnnnnnnnnnnnnnnnnnnnnnnnnnnnnnnnnnnnnnnnnnnnnnnnnnnnnnnnnnnnnnnnnnnnnnnnnnnnnnnnnnnnnnnnnnnnnnnnnnnnnnnnnnnnnnnnnnnnnnnnnnnnnnnnnnnnnnnnnnnnnnnnnnnnnnnnnnnnnnnnnnnnnnnnnnnnnnnnnnnnnnnnnnnnnnnnnnnnnnnnnnnnnnnnnnnnnnnnnnnnnnnnnnnnnnnnnnnnnnnnnnnnnnnnnnnnnnnnnnnnnnnnnnnnnnnnnnnnnnnnnnnnnnnnnnnnnnnnnnnnnnnnnnnnnnnnnnnnnnnnnnnnnnnnnnnnnnnnnnnnnnnnnnnnnnnnnnnnnnnnnnnnnnnnnnnnnnnnnnnnnnnnnnnnnnnnnnnnnnnnnnnnnnnnnnnnnnnnnnnnnnnnnnnnnnnnnnnnnnnnnnnnnnnnnnnnnnnnnnnnnnnnnnnnnnnnnnnnnnnnnnnnnnnnnnnnnnnnnnnnnnnnnnnnnnnnnnnnnnnnnnnnnnnnnnnnnnnnnnnnnnnnnnnnnnnnnnnnnnnnnnnnnnnnnnnnnnnnnnnnnnnnnnnnnnnnnnnnnnnnnnnnnnnnnnnnnnnnnnnnnnnnnnnnnnnnnnnnnnnnnnnnnnnnnnnnnnnnnnnnnnnnnnnnnnnnnnnnnnnnnnnnnnnnnnnnnnnnnnnnnnnnnnnnnnnnnnnnnnnnnnnnnnnnnnnnnnnnnnnnnnnnnnnnnnnnnnnnnnnnnnnnnnnnnnnnnnnnnnnnnnnnnnnnnnnnnnnnnnnnnnnnnnnnnnnnnnnnnnnnnnnnnnnnnnnnnnnnnnnnnnnnnnnnnnnnnnnnnnnnnnnnnnnnnnnnnnnnnnnnnnnnnnnnnnnnnnnnnnnnnnnnnnnnnnnnnnnnnnnnnnnnnnnnnnnnnnnnnnnnnnnnnnnnnnnnnnnnnnnnnnnnnnnnnnnnnnnnnnnnnnnnnnnnnnnnnnnnnnnnnnnnnnnnnnnnnnnnnnnnnnnnnnnnnnnnnnnnnnnnnnnnnnnnnnnnnnnnnnnnnnnnnnnnnnnnnnnnnnnnnnnnnnnnnnnnnnnnnnnnnnnnnnnnnnnnnnnnnnnnnnnnnnnnnnnnnnnnnnnnnnnnnnnnnnnnnnnnnnnnnnnnnnnnnnnnnnnnnnnnnnnnnnnnnnnnnnnnnnnnnnnnnnnnnnnnnnnnnnnnnnnnnnnnnnnnnnnnnnnnnnnnnnnnnnnnnnnnnnnnnnnnnnnnnnnnnnnnnnnnnnnnnnnnnnnnnnnnnnnnnnnnnnnnnnnnnnnnnnnnnnnnnnnnnnnnnnnnnnnnnnnnnnnnnnnnnnnnnnnnnnnnnnnnnnnnnnnnnnnnnnnnnnnnnnnnnnnnnnnnnnnnnnnnnnnnnnnnnnnnnnnnnnnnnnnnnnnnnnnnnnnnnnnnnnnnnnnnnnnnnnnnnnnnnnnnnnnnnnnnnnnnnnnnnnnnnnnnnnnnnnnnnnnnnnnnnnnnnnnnnnnnnnnnnnnnnnnnnnnnnnnnnnnnnnnnnnnnnnnnnnnnnnnnnnnnnnnnnnnnnnnnnnnnnnnnnnnnnnnnnnnnnnnnnnnnnnnnnnnnnnnnnnnnnnnnnnnnnnnnnnnnnnnnnnnnnnnnnnnnnnnnnnnnnnnnnnnnnnnnnnnnnnnnnnnnnnnnnnnnnnnnnnnnnnnnnnnnnnnnnnnnnnnnnnnnnnnnnnnnnnnnnnnnnnnnnnnnnnnnnnnnnnnnnnnnnnnnnnnnnnnnnnnnnnnnnnnnnnnnnnnnnnnnnnnnnnnnnnnnnnnnnnnnnnnnnnnnnnnnnnnnnnnnnnnnnnnnnnnnnnnnnnnnnnnnnnnnnnnnnnnnnnnnnnnnnnnnnnnnnnnnnnnnnnnnnnnnnnnnnnnnnnnnnnnnnnnnnnnnnnnnnnnnnnnnnnnnnnnnnnnnnnnnnnnnnnnnnnnnnnnnnnnnnnnnnnnnnnnnnnnnnnnnnnnnnnnnnnnnnnnnnnnnnnnnnnnnnnnnnnnnnnnnnnnnnnnnnnnnnnnnnnnnnnnnnnnnnnnnnnnnnnnnnnnnnnnnnnnnnnnnnnnnnnnnnnnnnnnnnnnnnnnnnnnnnnnnnnnnnnnnnnnnnnnnnnnnnnnnnnnnnnnnnnnnnnnnnnnnnnnnnnnnnnnnnnnnnnnnnnnnnnnnnnnnnnnnnnnnnnnnnnnnnnnnnnnnnnnnnnnnnnnnnnnnnnnnnnnnnnnnnnnnnnnnnnnnnnnnnnnnnnnnnnnnnnnnnnnnnnnnnnnnnnnnnnnnnnnnnnnnnnnnnnnnnnnnnnnnnnnnnnnnnnnnnnnnnnnnnnnnnnnnnnnnnnnnnnnnnnnnnnnnnnnnnnnnnnnnnnnnnnnnnnnnnnnnnnnnnnnnnnnnnnnnnnnnnnnnnnnnnnnnnnnnnnnnnnnnnnnnnnnnnnnnnnnnnnnnnnnnnnnnnnnnnnnnnnnnnnnnnnnnnnnnnnnnnnnnnnnnnnnnnnnnnnnnnnnnnnnnnnnnnnnnnnnnnnnnnnnnnnnnnnnnnnnnnnnnnnnnnnnnnnnnnnnnnnnnnnnnnnnnnnnnnnnnnnnnnnnnnnnnnnnnnnnnnnnnnnnnnnnnnnnnnnnnnnnnnnnnnnnnnnnnnnnnnnnnnnnnnnnnnnnnnnnnnnnnnnnnnnnnnnnnnnnnnnnnnnnnnnnnnnnnnnnnnnnnnnnnnnnnnnnnnnnnnnnnnnnnnnnnnnnnnnnnnnnnnnnnnnnnnnnnnnnnnnnnnnnnnnnnnnnnnnnnnnnnnnnnnnnnnnnnnnnnnnnnnnnnnnnnnnnnnnnnnnnnnnnnnnnnnnnnnnnnnnnnnnnnnnnnnnnnnnnnnnnnnnnnnnnnnnnnnnnnnnnnnnnnnnnnnnnnnnnnnnnnnnnnnnnnnnnnnnnnnnnnnnnnnnnnnnnnnnnnnnnnnnnnnnnnnnnnnnnnnnnnnnnnnnnnnnnnnnnnnnnnnnnnnnnnnnnnnnnnnnnnnnnnnnnnnnnnnnnnnnnnnnnnnnnnnnnnnnnnnnnnnnnnnnnnnnnnnnnnnnnnnnnnnnnnnnnnnnnnnnnnnnnnnnnnnnnnnnnnnnnnnnnnnnnnnnnnnnnnnnnnnnnnnnnnnnnnnnnnnnnnnnnnnnnnnnnnnnnnnnnnnnnnnnnnnnnnnnnnnnnnnnnnnnnnnnnnnnnnnnnnnnnnnnnnnnnnnnnnnnnnnnnnnnnnnnnnnnnnnnnnnnnnnnnnnnnnnnnnnnnnnnnnnnnnnnnnnnnnnnnnnnnnnnnnnnnnnnnnnnnnnnnnnnnnnnnnnnnnnnnnnnnnnnnnnnnnnnnnnnnnnnnnnnnnnnnnnnnnnnnnnnnnnnnnnnnnnnnnnnnnnnnnnnnnnnnnnnnnnnnnnnnnnnnnnnnnnnnnnnnnnnnnnnnnnnnnnnnnnnnnnnnnnnnnnnnnnnnnnnnnnnnnnnnnnnnnnnnnnnnnnnnnnnnnnnnnnnnnnnnnnnnnnnnnnnnnnnnnnnnnnnnnnnnnnnnnnnnnnnnnnnnnnnnnnnnnnnnnnnnnnnnnnnnnnnnnnnnnnnnnnnnnnnnnnnnnnnnnnnnnnnnnnnnnnnnnnnnnnnnnnnnnnnnnnnnnnnnnnnnnnnnnnnnnnnnnnnnnnnnnnnnnnnnnnnnnnnnnnnnnnnnnnnnnnnnnnnnnnnnnnnnnnnnnnnnnnnnnnnnnnnnnnnnnnnnnnnnnnnnnnnnnnnnnnnnnnnnnnnnnnnnnnnnnnnnnnnnnnnnnnnnnnnnnnnnnnnnnnnnnnnnnnnnnnnnnnnnnnnnnnnnnnnnnnnnnnnnnnnnnnnnnnnnnnnnnnnnnnnnnnnnnnnnnnnnnnnnnnnnnnnnnnnnnnnnnnnnnnnnnnnnnnnnnnnnnnnnnnnnnnnnnnnnnnnnnnnnnnnnnnnnnnnnnnnnnnnnnnnnnnnnnnnnnnnnnnnnnnnnnnnnnnnnnnnnnnnnnnnnnnnnnnnnnnnnnnnnnnnnnnnnnnnnnnnnnnnnnnnnnnnnnnnnnnnnnnnnnnnnnnnnnnnnnnnnnnnnnnnnnnnnnnnnnnnnnnnnnnnnnnnnnnnnnnnnnnnnnnnnnnnnnnnnnnnnnnnnnnnnnnnnnnnnnnnnnnnnnnnnnnnnnnnnnnnnnnnnnnnnnnnnnnnnnnnnnnnnnnnnnnnnnnnnnnnnnnnnnnnnnnnnnnnnnnnnnnnnnnnnnnnnnnnnnnnnnnnnnnnnnnnnnnnnnnnnnnnnnnnnnnnnnnnnnnnnnnnnnnnnnnnnnnnnnnnnnnnnnnnnnnnnnnnnnnnnnnnnnnnnnnnnnnnnnnnnnnnnnnnnnnnnnnnnnnnnnnnnnnnnnnnnnnnnnnnnnnnnnnnnnnnnnnnnnnnnnnnnnnnnnnnnnnnnnnnnnnnnnnnnnnnnnnnnnnnnnnnnnnnnnnnnnnnnnnnnnnnnnnnnnnnnnnnnnnnnnnnnnnnnnnnnnnnnnnnnnnnnnnnnnnnnnnnnnnnnnnnnnnnnnnnnnnnnnnnnnnnnnnnnnnnnnnnnnnnnnnnnnnnnnnnnnnnnnnnnnnnnnnnnnnnnnnnnnnnnnnnnnnnnnnnnnnnnnnnnnnnnnnnnnnnnnnnnnnnnnnnnnnnnnnnnnnnnnnnnnnnnnnnnnnnnnnnnnnnnnnnnnnnnnnnnnnnnnnnnnnnnnnnnnnnnnnnnnnnnnnnnnnnnnnnnnnnnnnnnnnnnnnnnnnnnnnnnnnnnnnnnnnnnnnnnnnnnnnnnnnnnnnnnnnnnnnnnnnnnnnnnnnnnnnnnnnnnnnnnnnnnnnnnnnnnnnnnnnnnnnnnnnnnnnnnnnnnnnnnnnnnnnnnnnnnnnnnnnnnnnnnnnnnnnnnnnnnnnnnnnnnnnnnnnnnnnnnnnnnnnnnnnnnnnnnnnnnnnnnnnnnnnnnnnnnnnnnnnnnnnnnnnnnnnnnnnnnnnnnnnnnnnnnnnnnnnnnnnnnnnnnnnnnnnnnnnnnnnnnnnnnnnnnnnnnnnnnnnnnnnnnnnnnnnnnnnnnnnnnnnnnnnnnnnnnnnnnnnnnnnnnnnnnnnnnnnnnnnnnnnnnnnnnnnnnnnnnnnnnnnnnnnnnnnnnnnnnnnnnnnnnnnnnnnnnnnnnnnnnnnnnnnnnnnnnnnnnnnnnnnnnnnnnnnnnnnnnnnnnnnnnnnnnnnnnnnnnnnnnnnnnnnnnnnnnnnnnnnnnnnnnnnnnnnnnnnnnnnnnnnnnnnnnnnnnnnnnnnnnnnnnnnnnnnnnnnnnnnnnnnnnnnnnnnnnnnnnnnnnnnnnnnnnnnnnnnnnnnnnnnnnnnnnnnnnnnnnnnnnnnnnnnnnnnnnnnnnnnnnnnnnnnnnnnnnnnnnnnnnnnnnnnnnnnnnnnnnnnnnnnnnnnnnnnnnnnnnnnnnnnnnnnnnnnnnnnnnnnnnnnnnnnnnnnnnnnnnnnnnnnnnnnnnnnnnnnnnnnnnnnnnnnnnnnnnnnnnnnnnnnnnnnnnnnnnnnnnnnnnnnnnnnnnnnnnnnnnnnnnnnnnnnnnnnnnnnnnnnnnnnnnnnnnnnnnnnnnnnnnnnnnnnnnnnnnnnnnnnnnnnnnnnnnnnnnnnnnnnnnnnnnnnnnnnnnnnnnnnnnnnnnnnnnnnnnnnnnnnnnnnnnnnnnnnnnnnnnnnnnnnnnnnnnnnnnnnnnnnnnnnnnnnnnnnnnnnnnnnnnnnnnnnnnnnnnnnnnnnnnnnnnnnnnnnnnatatatcttatcctattaaggtaaaaaaaataagtcctacttagttaaataatatagttataataatattaaagtaatttaggaactatagtctataatcgaggatactaaggcccttaataactataaggctaagttaactatagtagtaaagatactaaaaaagaataggactaagaatatatatctaaaatataagaagctttaattatagattaaaaattagtactatattccctatattaatagaatttatatataggtataggtaaagttattatatctaactaaacttaaatactaatagaatagtattaaaaatataatagagtagtaaaataaactctatacttagggtatcttaggaaataggggctaagtttatagggataaataaagtattactaagtatacctatattaagaactatactttcctctataatattaatagaagtattaaagaactccttaactttagagatttcccttatattttctataatccctaaggctctaagaactttagtaattactataatctctatagcttctataatagtagtagcctttttagccttattagctatataggttaagtacttaatattctacttaataatatatacttaaggtatataagtatatataggtaatatattaagagtaatataggtagtagactaaatcttagaaggaagctatactattattaataataaattccttcctataataatatagttaaaacttataaggatataactatactttataaaagagtagtaaatatatttaatataacctataagggtcttatacttatagtctaggtagctttataactagaaaaagtattactaataaggtaatagccctttaataggcttaggggtttctaaatatgatactattaaaatagaagtatattctatagaagttagaaatactaagtacacttattactagctataaaaagctaagtaagtactatatataaataattagttataaaggaaacctctttactattaggataatactagcccttaatagttaacttcaattcttctaattagatagctactaggagcctaaatagtataataaatattagaaatccttcttagatatattagtatcttattaagaataccttactttagactaggggttagctaatatattaactataatattagctagctttaggctatataggctactaaagagtaggtagaagtctataagactagctattaataaggtaacctaataccttaatagtagtatactatatcttagtcttccctactattttactatactatactaaccactctctacctttagaccttattaatactaagcctttatagttctagtaggagaataaaacttattttcctataattatataacttacctacgatatcctcttaatactaataactagggctagtattaagtaactctttaatactatataggatatttactattattaccgcggttacctaaagtctaagataattaaggagcttatactatactactatataactaagtttagtattaaggatactaagataaaggaattatagtagttacttagtctaatagaggctaaggttaagaataaggagagtactaactttctagaggatagtaagtataatctaattaataataataaggaggagaagggaggggaaggtaatagggtataggaggtatctccttcctccttagctagtagggataggggtagtaatagtgatagtaagatagagggggtttagctagatttactagagcctattactctattttatatatcttagaggaagtataagagtagggttaataataattatatatattattagaatatattaatagtactatcttcttaatttttactcctttctttaaattttcctagtattctagctataactaggatatataataatataggttagaaatatattagttatatatctatacgctagaggcctatttatattatataaggcctatataggcccctattataggctataggcctagggtatcagcctataatttagtgtgggccgaagaagttagcctaaagcctagcctattggtaggctgggctgggctaggctataggccgggtgggctttgccaatatctactcctatctagtctacagtcccctatatacctaggacaggtactccacacaccctaacaggtacaatacttcaggcatcagccttcttagtactagggtcctgacatttatatatatgacctgatttctgatccaaggggggcctttaatatatagcttatagaccttgagtattgaaattgaagaaagaagcacaagtatcagcaactagtctatatgcaccataagtgactagcaccacaggcaataaattccagggaagactatctagtccttattgctgcctgataccataaatatgagattaggacatgtcacccataagatcttcatccatctcaagtccagcctccacccctacaatgggattgacttcactagaccccgaccaaacttgacccttgtgtaggctatcaacgtactcatcgcttaatcccagattgtgattagttttgccaagattaataaccatggtctccatgagcttcatctcttgcttgagttgggactgtaagtccaactcatgagagagtcgaggtaacgaatggatggatgagaaccgcagcatagaagattcagcatcatctttggtctgtaccaatgtcgcgttcaaatcacgagacatgatgagggatgaaacagcggatccagtaacttcggcggacacaggggaggggaacacctgcttcgagaggtcgaccatcgttaaagctgcgaaggtcttcccaagcttgatcacggtttgactgaagaaagcacccactacctgggtaacaagaccgagattattgtcctagagtggcggcattagccctggatgtcaaaacgataccacctactcaattagcaccacaacttaccgcgcaccagactccattggcagcatcaatttcagcattaagcctcttcaaatcaccacgttcaaatgcatgagcaagaatgatatagggcctcgcaattgattgatacactttagccacatgaggtgttgtgatgcttggaggcggacagagctgtccacaaaaataattagcttgagaaaacaatgctgtcgagtctcctttcttttctttctcagatatcttaccttgcctttttctagcaagcttaccagcacccattttttgtaggcttccaccataatcaagctcacggagttagtactaggtgtagagatgacaatcccaaggaaatgaagtgcattgcgccactccttcaacgccatgtacaccataccaccataaagaaagtactgcaagtagtctcgatatgatagcttggatgaaatccgggaatcttcggtcataaaggatacacctgacccgtgatctgcgcagagcacagagggatcggaagggggacttcccagcgagattgggaaatgacaaatctgcttattcaagaccggcaatgcacaagaatacgccttggcctcgagacaaagccggacaagcaaaaggtgactcgaggtgaaaacggcacatgatgggtcgagacgaagcatagcgtctttgaccagcgtagcacctagcagtggctgtagtagggttaggttagcaattagatataagaaaccttgaaaaatagccgacttgccattgatgcagcttgtgagacttgccccactagctcaataagttggcgccattctcgcccagcgtatttgacctgaaccccatcgaaactcgtcaaaaaatgtgcagcgcatatccagagcttcccagaggggcgaatatctgctggaaatgaatcggcattcagttcctgtgccttttgtatttgcacatgtagcacgaaaagatatgggatagaatctatcgctggatcaaaacgctaaagacaaatacatattagttgcgatcttgccactctatagaaccctctcagatggacttgatacaaataaagctgcttacatcgagaaaagactcatcattagcaagtgagtcgagtgccttggttgtttgtagccgcctgaagtattgaactagctcgcgaacctgacggtcatactcatcgctgggtgggtgattagagttgtgtaactgcgccgatgcggagataatatccgaaaggagtgtcatcctggaagtgtatgaaagagaagcacaagatagctcagcgtcaaatgcgcaaaggtgtgttgtttctaaaaccagtgtgatatcttggctctcgcttttatgatatcaggattgccatacaatagagactcaaggttggacgaggaaaagagagcgaaagaggagaagagagatttggtaaagtgttgtaaaagaaacgcgacgtaggtagttgtgatgattattggagacatctggacctcggaaaggtgggtaaatccgagacgagcgggatcgataacgtacccctccacactgagtgtgactcaattttttcttttctctttccctttcctctacttctacaactttcacttctctccgacgattatcgttcaatctatataggagcggaggttatttggcaccatgtcattgaccgaatccgtagcagttgatgtcgcccatagcgcatcacttgcctctcgtcgtcttgcaactttaaacaacgatgaccgcaataaagctttgacgttgcttcatgatgcattggaaatgaaccaaaaggacatccttgaagccaatgctagggatgtgaaacttgctactattgcagccgacaatggggatttgagccatagcgtgctcaagaggcttgatctgtcgcggcctggaaaatacaaagatatgcttgatgggattttgagtgtgcgagatttggatgaccctagtgagtttactttccaatctttaagcttcattgagacagtacttaatagtatacaatcatagttgggaaagtcacactgcgaactctccttgacgatggtctgacattggagagagtcagctgccctatcggtgtgctactgattatctttgaggcccgcccagaggtaatagcaaacatcgctgcgttagccatcaagtcgggtaacgctgctattctgaaaggtaacacgcaagcccttataaaggtttcatgatattgttccattgacgcaaatttctaggtggaaaggaatccatggaatccttcgcggcaatcgcgaacgttgtctccaaagctatcgccgaatctcgcgtaccggtatcatcgattcagctggtcaagacacgcgatgcggtgtcttctctcttggcccaggattcgttaattgacctggtcattcctcgaggttccaacgaactcgtccgtttcgtgaaggacaacacgaaaatccctgtgcttggacatgccgatggcctttgttctgcttacatacatgccgatgccgatatcgatactgctgtgaaagtgattgtggattcaaaaaccgactatccagcggcatgcaactcattggagaccttgcttgtccatgaggatacccttgaattggtcttcccggcggtagctgctgctctcctagagaaaggcgtgacccttcgttgtgatcctgattcaaaatctgctttgaccaagacattgccagccgagaaatcagtgcaagtacaaacggctaccgaatccgactataacactgagttcttggaccttgtgttggcagtgaaaacaattccctcgactgaccctccaatcgcggccgtggaggctgccattacccatataaatatgcattcctcaaagcataccgagataattttgactcggtcaaaagaagcggcggatatgttcatgggcggaattgatagtgccggtgtcttctggaatgcatctactaggtttgccgatggcatgcggtttggatttggtacagaagttggcatcagcaccaacaaaatccattcccgaggaccggtcggacttgagggcctgaccatctacaagtacttgatccggggaaatggtcacggtgcagcggactatgacggtgaaggaaggaaaaaatatctgcatactagactgcccataggccagtaatcgcctccagcgcaacgcatcaatagaaggatatcattttagaaaatattttttttcttgctttcttgtttgaaaaatcccataagaaaaaacttaggacaaagcctgattcaattttcttttgccccttcattcgtaaattctcatttcccagtccaaccaaagacatcccgccacttttaagtacacagacttgaggcctttggctagaactgaaacgattccaggcaccgagaaagtcaatgtggccaatgcatcttttacaatacatacacaccgcattaccctcatcaagtcccttagaccttgaagcccttggaccttctgcgtccacgggcccgctcgaacttgcggcccttgcttgccacatacggcttctgttttgagtcagtaaatttgaatcacataatctcgttttccagtagtcgtaatcataacgcaccttgtcggtgtgaggaccgaagccgaagtgcttcacggcctcacgggcgttcttaggtccacgcaggaggagagtgttggcaccggtaggagcgcggagagcaagctggtcaagagtcaaagtctcaccaccagccttctcaatgcgagcgcgagcggtagcggtgaaacggagagcagcaatcgacagcttagggacggtcaaaaggcggttgtcatcggtgacagtgccgacaacgacgacggtcttgcccttctgcgcctcgctgatgttggcgacagcgcgagaaagtgaaacaggggggcggttgattctcgacataaagagacgacgaaggacggccttgttaaagttggactcagtgcggcctatcacgcatctcatatcagcctcacgaaaatccccacaacggtatacctgtagaaattgcgctgcaaacgaatttcggaatcgggaggagggggggggggggggggttcaaaggacacaannnnnnnnnnnnnnnnnnnnnnnnnnnnnnnnnnnnnnnnnnnnnnnnnnnnnnnnnnnnnnnnnnnnnnnnnnnnnnnnnnnnnnnnnnnnnnnnnnnnnnnnnnnnnnnnnnnnnnnnnnnnnnnnnnnnnnnnnnnnnnnnnnnnnnnnnnnnnnnnnnnnnnnnnnnnnnnnnnnnnnnnnnnnnnnnnnnnnnnnnnnnnnnnnnnnnnnnnnnnnnnnnnnnnnnnnnnnnnnnnnnnnnnnnnnggggggggggttcatacgagccaagaagcggtagagcttcaccagaaccttcaagtagacgttgtcgctcttgggagccttgcggtggctgctccgcacatggtggcggtccaagtcgatacctgcaatttatgaacggtcagtggaatgaactgacaacgagaagaaaaagcgaaggggttcgaatgaatgctgcgggatgcgataatcgagtaaaaggagatgattgaacatacccatggctgtgtattggtcgacttcccgggaaatagcttgctgtcgcacccgtatggaaagtgcaggaggtttttgatccttgactttcggctggacagtggtgtgtgggtttagccctacgctagacctgactaggaaaggcgaggcacatgacctaagtaaagccacgtgacttgtacatgtttccattcgccacttggtcacgtggtgtaggggtctggttgcatctaacaaatgaaccttatcttcagattctgttagttatctgccgtgcactctgtacgtctacatctccaacctacatcaacatcaacaattctgtataacagaacatttcatctactctttatctatgtgtatatatgcattatgtataatcaaatgttaatgataaaaatgagaaaaatatatctaggcacatatgttattagaactattctccatcattcaagccgacaaagaaatcacgagtcatttcataactcaaccagctgcttgccatactaggagcaactttcagaagattcggccctatccccttgaagagtccacgtagtccctcttcagccacgatgaccctcacagcatcccagatcgaggtgtattggtaacccattcccgacattgtgttgatctggaatcgccgacgtaggacatcactaagggaaagtcagtttcacggggcctagccaaatagaataagataaccgacaaaggataggtacaggtctgggcgactgccccagagaccgcgccggcgagtaattttcgacaagagctagggtttttgtccccttctggtgttagatacttgcgcgccgattcgtaggtcatgaaattgagtcccacctgtggttcgtcagttgtgaccaagtcaaattaagctgaaaactcacgtatggagctaccccagcaacagtaggaacaattccacggtatagagcctttgttccaccttcattcttatagatcatggttattgtcgtgaacatgcctggcagtttctggcttggatctcttgctccaagttcggcaaatgaagcagattgaatggaaagtcgtgttcgaacaatgtccagaggataggtgatagtcaccgaagtgataccggcaaggccgccacaaaaaaggcgaagcatcggggtcatctcaccatcgggagactctacgaactgaatcaaagaaatgtcagtttgcatcaaaccctagttctgcaggatagaaatagccacccacttgcttataaaaattatagcttccaaactgtaccgcagagtaggggataatgcgaatacagtttgttccatttcctcgcatgaagccccgccagccttcttcccgccccatctttactaaggctttccagattgacaatctgtattctgttcgaccgacgctttgaatctgaagaaggattttcaatctttcgagtggcgacactattgtcctggaaactgcaccagccactccaccagccataaatgcagccaccattggttcggcgaggtacttcctagtacgaacccagattgagggagttttctccttaatcagctcctgcttaatcaactagtcagcctcgcagcgcatatggaccggagatccccttctcaccttagctgcatttgaactagatggaaacttggatagagtctgcaaggcaggctttggatcaccttccaactgctccttttgaacatcctggcgatctaagctcatcttgacgatatgcacatccggttcggcaatgaggttgataaagaagtcctttgtgatctgccgtgtaatgattttctgaaattattttaattggagaatgatgcttgattgtcgctgaaaatcaaatgcgatataacactattgatgtagtgctagccatgaagattgattgttttccaaggcttggtgatctaaaaacacatcattgattttgtgtcaagtggtgtattgcttttttttccaacggccatataactgaggtataaagggtaatgttgatagtggatttgccaaaaaggagaagcgtcgaaaagaaaggacgggttgttgggccggagttgcttttcttttccccttcaatgttgggaggagatgtcgttgaacaggtcaagagaaagaaggaataagaacacaaataaatcacacaagaggtggtatgtatacctggaaaaggtgcttggaggtttagaaagagaagaacatcccgacttaccgacagacacggtacctcccgatagtccgccacttatattacgtacctacattggggggtccacgggcgaactagttacatagtatagttccctcaaaccgattgtataagtactccagacagatcaaatctagatctagatctatgatttaaataaagaatattacacttgtcaagagcctatttatcaataccaagtttctctcgtaaaataaaacagagaagaaaaatcaaagaaaccaaagaataaacctttcatcaattgcgtcattggcatgtttgatccaccgtagcacctttatcacgatttctttcttgcgccctctctctcttccttatactctttatcctcttgaagcttcttaagctccatctctcatttcaaattcttccaaatactttccaactgacacaatcttctttatttttcattgctctgtgctaacggcaccatgtcttctcgctctggaactactctgtatgttaccgggtttggccatggcacccgtgctcgcgatcttgcctacgaattcgaacggtacgtgtcgcctataccttcgcctctacgaacttcgattcccatccttccgacgacctcccgatgaagaccattggcactaaatgccttggacgacactcttctttctactagcgtgacattggtgtggaagcttgtgtctacgttgccccgtctcactccttgggcaactgtcagctagtcttggtcattccttatcataatttctcttaataccgatacctgaagctagctcaactgattttggaactagttatgggcgtcttgttcgctgtgatatccctgccccgcgcactccctctagccgactgtgagttgaaatgatatctgaaaccactttacctgtctaatctaagtcgcttagtttcgcattcgttgaatacgagagtcgccgcgatgccgatgatgcttaccacgagatgcacaacaagcgtatcggccgcgatgatttgctgaagattgaggtaagcatatccgcccccccgaagctttgttaaatatcttttaacctatctccagtgggcacgtactcctccctccgcttcctggcgctttgactctggctctggccgtgacgctccccgtgacgctccccgtgacgctggccgcgatgctggccgtgatcgtcgccgtgatcgcactcctcctcgccgtggtcgttctccatccccccgtcgtagccgtggcggcgactattccccccgccgagatgatcggtacgaacgtgacgccgaccgtaccgaccgtgactacgaccgccgcgaccgtgatcctgaccgccgtgaccgtgaccacgatcgacgtgaccgtgaccgttctcgtgaccgctctcgcagccctgacgaccgtgaacgcgatggcaaagatgaccgggaaagacgcgatgatgatcgcgagcgtcgtgaggaggaccgtgaaaacggccccaacggtgaggacaggaaaggtcagttgcctcggaatctaacctagaaaacgttcttttcactcacatacagcagtacccctggacccaatgccttctgctcatgatgagcttgatactgctgagtagataaactcagtattacgttcattcgctctcgaaccatgcccccgtcgtcattcttttttcgtcttctgaaggtgtccttcattgcggttgagccaacggggagggaggatacaaagttatcgcccagtgtttctcttaataccaccctgtggcatatctcgtatctcgtccccctttgcctcttgtgtgcttctgatttcaaatggcatgaagcttgctcttcgggacaagctggagccaagtgaatgtgtgacccttgctccccctaccttttttttttttcgaattttccttttccccaagttattcccaatatttcttttttgaggttggtaatttatcctggtcagcagctcggatcccaccgaagcgaacgtcgagcgaccgttccaagtcggcgcccaaaaaccacgatgaaatccgtttcgcccttcgtcttgttcgcaatttaatttgaaagcggttatttcaattcctcgccctctccgaccggtcgccatcctatgtggtctggtattttctaaaccactgtagtgccttagttgtatgtgaggtcaatgcaaagcaccagttctatggctttgttaataacaaaaaaaagcaatagaatttctgagatcatgacatgacgtaagctatttggcgcggggaaccgcaatcaatccatcaagcaatccagtagaagcatccctgaagcccaaattattgcagctttattcaactttcagctactttatactacctcctgtcatgagttcagcaaagaaaacaggtatcagcattgctatcgatgtattacctcccccttcactactttattcagaacactgacataacaaagagaggcggcacatttacagactgcattggaaatccagggacaggccgcttggaagatgacattgtgattaaactgctctcagaagaccccaacagctacgaagatgcacctttggaggggatccggcgtattctttccaaatttaccggtcatgaaatccctcgtggggaaccaatcgatacttccttgattcagagcattcgcatgggcacaaccgtggcaacaaatgcgctactcgaacggaagggggagaaagtggcactagtggtaagcaagggcttcaaagactgcctcgagattgggaatcagtctcgtcccagaatatttgaccttgctatcaaacgtcccgatgtcctttacgaggaggtggttgaggtagacgagcgtgtcactttggaagactacgcagaagatccgcaacgaaacacaactgccactactctccgggaacaggcccgggcagaagacgaggttgttcgcggcctttcttcggaagcagttcgcatactaaagcgcccatctgagggcttggtgagatcacaactgaacgaggtatatgaccgcgggattagaagcatagcagtatgtcttatacatgggtacacctttccagaccatgaggcactggtgggaagaatcgccaaggatattggtttccaccatgtgagtttgagccaccagctcatgccgatgattaaacttgtgccgaggaccacttcagcctgcgccgatgcatatttgacccctgccatcaagaagtatatctctggattccaagccggatttgaaggtggtctaggcagtgaaagtgtcaaacagcaggcgagcgccaaaggtgctcgctgtgaattcatgcaatcggatggcggtcttgtggacgtggaccaattttcgggcctacgagcaattctatcagggcctgctggcggagtggtggggtatgcgctgacttcctacgatcccttgtcgaaaataccagtaatagggtttgatatgggagggacgagcacggatgttagcagatacggatccggtcggtacgagcacgtctttgagacaaccactgctggggtgacgattcagtctcctcagttggatatcaacaccgttgctgcaggtggtggctcgaggttgttctaccgtaacgatctcttcgttgttgggcccgagtcagcgggagctcatccaggacctgcatgttaccgcaagggtggaccactcacagtaaccgatgccaatctgtttcttgggcgattggtcccagacttcttcccgaagattttcggctcagatgaaacccagggactggatgaacaagctagtcggatgttgttcgaagaattaaccaaagaaatcaaccacaagttgaccaaagggggccaaagtcgagaaatgtcccctgacgaggttgccttcggttttatcaaggtagccgacgagacaatggcccggcctattcgatccctgacagaggccaagggacatgacacatcaaaacataggttggctacgtttggaggagccgggggccaacatgccgttgccattgccgagagcttggggattcggcagattttgattcatcggtattcctcggtgctctcggcatacgggatggcactggcagacgtcgttgatgaaaaccaacagcccgaatcgaagacctgggctgatgatggcaaggaggaggttcggtatgcactttcttcaagaatggaagaattaaagaaacgatctacgcagaggctgcaagaacaaggcttcgacaatggttcaattgtgtttgaagaatacctcaatatgcgatatcgaggcacagaatctgccttgatgatacttaaaccaagcaaagaggaggccgatcttcactttgggggcgacgaatgggcttttgggaaggcatttatgaagcaacacgatcaagagtttggttttactctcccagatcgggacatcattgtggatgacgtgcgggtgagaggaatcggcaaaggattcaaaatgtccgagaagactgtggaccggcagatccaggagtccaacccaaaggatgtgacgacgggccaagaacatcgcaggtctcttgtatacttcgagggcggccgacttgaaacgccaatctataaactcgacgacttgaaggttgatgagcgagtaagaggcccagcgattttagccgatgccactcaaacaatcgtggtgcccccagaagcttcggcgctcttgacaaaaacccacgttgtcatcaatattggggaatctgatgccagccagccaaagattagcactggtaatgtggatcctatcctgctgagcgtcttctctcacagattcatggctattgccgagcaaatgggacgtgctctacagaagacaagtgtaagtaccaacgtaaaggaacgacttgactactcctgcgcattgttcgacgcagcaggcgggcttgttgcgaacgcgccacatttgcccgtccatctcggtagcatgtcaacatgtgtacggatacaggcccggatctggcaaggtaaattgaagcccggcgatgtgatcgtgtcaaaccacccggaatttgggggaactcatcttccagacatcacagtcctgcagcctgcttttagcgagggaaagatcatattctacgtagcttctagggcgcatcatggtaagaccccccggcgaaagggagaagggggaaacaaacagatatactaacctgcatgaagccgacattggaggaatactcccgggatctatgccacctcattcaaaagagctttaccaagaaggcgcagccatcaagagcgaaaaattggtatcagaaggcaagtttaacgaggagcgcatcacagaattgctgtacaaagagccggcccagtacccaaactgcagtgggacgagatgcctagcagataacttgaatgatcttaaggctcagattgctgcgaataagaaagggatcaacttgatcagcactctaatcgaggagtacggcgaggatgtcgtgcagttttatatgcaccagatccaagacaatgcagagctcagcgtccgcaatctactaaaagacgtgagcaggagatttgctggtcaagaactgagtgctattgattatatggacgacgggagccctattcaattgaagatatcaatagatggggagaaaggagaggcaatcttcgattttgagggtacgggcccagaagtatacggtatgagagtggctttcaaggtgaaacctgatgtatgagctgacaatgacaggcaatatcaatgcaccggaggccgtcacatattcagcgatcatttattgcctgcgatgccttatttcagcagatatcccattgaatcagggctgtttaaagcccattgacgttcgaattcctcctgggagtcttctatccccctcggaatcagctgccgtggtgggtggcaatgttttgacggtaagattagacagatactgacgttgatcatgggctcatttcttatttcttcagagtcaacgagtgaccgacgtcattttgagatgcctccaggcttgcgctgcgtcgcagggtgataccaacaacctcacatttgggtttggagggaatatgcccggtgagacagaaacgaaagggtttggttactatgaaaccatcgccggcggtagcggggctggtccgacctgggaaggcacttcaggggttcatacacacatgaccaacacccgaatcaccgatgcagaggtgtttgagcggcggtaccctgtgatcctccgagaattcagtcttcggccgaattcaggaggtaatggtcaacaccgcggcggggacggcgttgtgcgagacattgaattccgtattcctgtgcaagtctctatcctctccgaacgaagagtctatcatccatatggattggagggaggcgaggacgcccagtgtggtcagaacatctgggtgcgccgcgtgagaaagcatgacggaagctgggaggaaagatatatcaatctcggcgctaagaattccgctcagatgctagcaggggagcgaatcattatccgtacgcctggaggaggagggtggggccaaatcggagaccagcgccaacttctcgaggagaaagatcatcgtcatgcttggcgggggggttctattgccaacaacatggcgacgcaggaggcgagtatatgatttatagggaaatttgggagtgagttgattcaatcggccaaggtcaatttgattatgataagaacgacaagggctatttatgggcaacgtaaattaaatcctccatggcaattatgcttcactctcctcatcacttgtcgcctcaatattctgctttgatagaccttggttgtccgaatgagcatgtccttgctctccttgatcggacaggccaccctctgccgagtagacaggccgaggcagagtttccccattttctttcaatgcctgctcaatctcaggtagaatagagacgatagtagcgaattgatccacgggcattgagataccctacgttgggaatgagagtattagcacggtttatgaaaactgactgatcaatcaaccttttttcctggcaactcctgcccgtccttttcatagtattctctaacattcacctgggttttcccacggaaagaagatatggtcaggcggcgcattttggatatttcccaatagcgatctccattagagtcgattttggtttccgctgtggtattgaccttggccttcttggggcgcacgctattatcaaggccaacgccggagtcagacgaacgtttcctggatgacatgacttgaatatgatattgggaaatgcgattgggagaacggatagaaaagatagaaagagtaagaaagtggaaaggtgtccaagcacgaatgcgaaacgcgaaacgcgaacacgtcatcacgtgaagaccaacattatatactccgtgttcatctttgacaattcctacctacatgtggtctctcatgtatattccaatatgatccattgaacatttaaagagtcaatactctaaggccctgtagtaaaatcgagaagacaaatcctcgagcgacactctcaacttgaagactatcaaagatcttctctagcgcttctcgactagcagctgcccccataacacttgttaaggcctgtggaattccccgctgcacaaatagtttacgtgcagtatcccgtaatcggatcttctcctcctcactgggtggagagggccaggctttaagttcctcctctgtcggaagcgcgttctcacgaagcttgacgaggtaataccccagggcgtcgtccgaagtgtggccttctatcatggaatcttgcaacagcgtacgaatagtttccaatgtcgggctgccgggacgtagaatatacgatttggcagcattcagaagggtccggcgtatgttccacgcagacgacaaggtgtacaactcattgatgaccgcaaagatcagctctactgctattttcgtctcatcagctgtgatgggattcccctgattgcggggtttatcaatactctgcccagtatctgatcggcgatgtgatgaggtttgatcaatagtttccgttgcccggacatcaagttctgcagtatgatcgctgatatcaagtgaggttttagagggtgagatctctgtggtccatgcaccccgttcactctcaaacgactctctggtactgccaaccgaagacgacttggaaatttcgcctccttggatttccagggggtcgctagggaacaccataggcgaatcaacgttttcgttgcttacgtcggtacgatcagcaaagctaaaccgtgtctgcgaccggatggcgcgactggagtcatcaactttgggttgaatctgatcagcaccgacagccggtttcttgccattggcggtgccgccaaacacccctgtcattccttcaaagacggctttaccgccccctgccactcccctgggcgcattggtcaatgcacccagcatacccttgcccatgtgttcaaacgcaatttgactagggaaagagaatcccggtttgttgttacagctaggttgagtggaagcaccagcgtctttttgcaaaaatcgccgcattcgatcagtgtcggcaagtgactcgtgcttcatggcatcttgtaaataccacccaaggtcccgagcgagagctagtcgtgttttgcccttccaggtgggcagtatggggtgacgctccgagaaactcgaaatctgattcaatcgtgaaacggtccccagtatctcgtgaagagattggaagtccgaatatttgcgaaacaccatccatccagtcgagcgtgttgacgctggttcgacctgtagcagataatcccacacgggtcgcgacttgatttggcctttttcatcccttgctccatcatcatctaccaacacttgtgccccatgaagaatcaaaggtggcacagaagagtcttcgaatgatttcgggcttgcaagtgattgcgtattaggtatcggcccctggtcttcgtggttttcgttctcatcagtcgtgtctgaagccaaatcagtgttcaaagggtaattttcgtcaaattgttcgttttggcgcgtccgttctgactccgagttctgtgtatcgtgggatacaatcatagcactcagacgtttcacctctagaaccgcctcttcctctgtagccctcgctacatgcatggaatctctctgtgtggctttgacggagtctgcctttgggtgttctgaagacctaggagcactgacaccctggttccgtgcaccctcaacgcctgcgtcgatagcgtgcataatttcggattcaccgccctgaagaagatagataatccattcattgataaattcaggacgggcaagactggtaacagttgaccccaatatcacgcccgcaaagacctcacggaggaagtcccgtacagccggataattgtaggttttggcatccaagaaattcgacagtatgtcatccgcgatcatgctgagttttttcttttgttgttccgcagacaagacattcgctaggctgctatccgggaattgttcaaggtattggtccacggttttttgggcttccgtcggggatgagctcgcagcagtgaatgctgctgcaagttcattcaagaatacaatgacgatagatgaggagttggtgagaaactgcaagaacgtgtcctctgttcgtttccgcgagaggtgcgaagaaactgaagtaatgaaatgagtcaaaatccttcgacaggagtctggaaaacttggctcggacggtaaaagtggctcataccagtatctttatttgggataagctacttgtttcacggttggacaaggggacgttaatagaggatacttacttgacataatcttgaatgacagcatcggtgagcgttctcagcgcgacagcggtggccggttggaaggtggcatactccaagtctgccgaagacatatcttccagcgtgtttatagaaccatcgtccccctggatgtctgaagcaccagcccgcctcggccagtctaaaagtctgttggagacttccagggcaagttctctacgccggttgggcttttgcacgtgggacgcttcttctccgtgttcgttatctgatccctcccaggacgcgtgtaggacaacccccacagccactccaatcagaagtagaccgattctccccaggacaatataggtgacgagtgcaagaagcgcaaagactccaaggagggtctcattggtagaggttgagagaaaattgaggatagcattgatgagttcctttgagatcgctgtatttaagatgggatctttcgtcgtgggagtattgtggtctttgtcggatggagctgaaatgacttcggagtcgtcatcactgaggcgactcattgtgctgagatatcccgggtttggagggtatccagagtaactttagttaaccctccatgtcaaaatcaaatgtgagtgaccttgtagatctgtgtagacaagaaaataaggggatacataactagcaacctgggaaaaatgcttggcggacttggccagtgcgtacatacctgacactcgtactccggtataagaaaagaacatttagacttcatggatgtacggaaaaccatagacaaagctaaaccgtatatataatgtattgtatgtatccaatcatgatttccttacaagcatgagctatatagcaaggaatctaaagctaacagaaaggagttgatcttcgctatccgagtgaatctgagcattcaaagagcatgcgcttcatgccagatgtaaagagattgcggttgggagaaagaaaagggaggtactctacaggggataacaacgacccaaaaacgacccaaaaacccatctggtcgggatatacttagtatatgtggcccttgggcaacaaaccaccagtcctcatgcggcgttcatcgagaggtacggtactcacttcgatgaaatccaaagacataaattccgaccgcattaagaagaaattcatggattgactcgaggaaataataccgtcggagattgatgaatggtcatgaagaaaactggaggaacaaagatagacaacaaagaagaacgaaagattttgtaggggaattttatattacctaatacttagccgacaattcctcgacgctagtcccattacagttagattacataactggagccgaggtcagttaggtgggcatacaagcctcagatagtgtagtgtatttttccaatcatttcatctatgtttttgttttcgtttatgcctctgtcttctagaaagcatctgcgagagcataaagtgattgacatcctcatctccccaataggtgagatggctagcaatgctggctatcaatgagatatcgaaggctcccctatattccgtcaacaaggttcaacaatgcagggcatatagtcttactcttggatgctgtagtccacacggccgtttgcattcaaggcacgcacttttgcgtcctcgaatttcagcctccgatcctggttagtgtcggcatcgggatctagactctcgccatgatgaacactcctgcttttttggaaaccatcgtaaagagtttctagatcagattcaatcaatgtgtgatggtgatcgtcggatccatcgggtgtatgctgagctgagcctgactgtgaccgtctatggattgattcatcacctattttactacaagtccgagcagccgatgaggcgtcatcgccattcagacccaagctgcgattcaataaactgcttgcaacacccgtggtaaaatttgtccatagggatcccacactttggcccatgcggctaccgagaatagacagactctgaccagaggtcgtccagaggcttttcttcaccgaaggtagaggctgaggcttcagggttgccatcgctggagatatcaaaggctcgacccggtagctcaccgggtcagagggatggaagatattgtagagatctcgacaccttggcgttgagatgataccagcattgtcgctgagcgtatgtctaggaccatgcgagtccaagtcgatctcgacatccatggaatttttgcgatttcggggacctaaggcagagtatccaccaatcgtcttacccttaagcatttgaaatagtgcaatgggtgatcccagacagaaaaactcttcgcagtcaaactcaaacgcacttgaacccttggggtgggccgagtcgtcgctctcatgggccattcccttggaggcaccattctgtccggtattgcttcctggctggtgacacaagatgtcaaatagaatcgcacttccaagcgaatggccgcagagactgactgaccccttaaaagaagggttttgcttccggtacagccggaggattcgattgcattcttggatgacaatattggagatatgttcacagtacccgctttggtacaagagtacatccatagccaaatctgaaatgaggtttcgaacagcaggtacactttccagtgttatatcggacaagctggggtaagcatcatcctcgagagcgtctgcatcagtaagatccagttcttttctgttccgccgaactcctcggtaaggaaagtccagaagatggcgccagcacctgctgaaattagcaaaaagaaatgccgagcaaaggaatcagtctcacacaggaagcacttgaacacggcagttcttatcgctgtctggatgcgccgagttcaacgcttggaggtcaggtgaacctttgtagacagtttttagcgtcttgcgaagcacatttacatcgtgtatgaaattgatgctttccagtcgcaagccgagtcgctggccaattccgtgggtgacaagaactagatgatcaacctcgcgctctctgtccgcgccgtccacttcccttgattcttccatctcctgttcctcctgcctacgagcctgttcctcgaggtcagctggattttgcggctcgcctgcgagggaggacatttggcgttctaatgttgatttcgatccactttcgtagtccttgaacccatcagaggaggttgacttgtctgtgtctttttctgtcttttctttcaaggcctcattcaaacctttggcggggtttgactcgcccagtggtttttgtttaggaccctttgcttctggtgtctcttttggctttctgggctcgaaaccgcgaaccaactttgttcccggaacgccccctagcttttgatataccgaagtactgaagcgtgacatgaaatcatcgttcataagccaggccgtcgtggaatcttgataaccgactatcctattcatgtaagcgccaaagagacgatactgctgaggctccactgtaggactaggactgctggaatcattccctgcggtacgaggagaagagttcgggttgattgattgaggggatttgggatctggctcaaaggtgttgattggcatctgaccagatctatcttcttcgtttgcttgcgaattctgttctgatggctgggacctccatggacacaatttgatatagccctcttcaagttgggtagcaaggttttcttcacatggttttaggctagatccatcctgaatgaaccacgttccacgacggacttcatacacaggaccaatccaataggtaggactcaattctcgttgttccacatcgacattgaaaagaaaatcctcattcacaggcactttggtcaatacaggttcgctgtcgtttggcgggttctgttggcgggcatcttcgatgtctgagagtttctggaacatcgcttcaatagactgagagtctttccctgggaaaggtatgaatttcttcggcgatggtaagggcttttggtccgcctttttctgtcctattatggacggtttccgcttgggcgagtccactgcgtagaaccacctgactttcgatggagggcaatcgggaggatagcgtcgcatgcttaatcgatgcatgtgggtcaccgtgtggtcctccccttgcgaccgctgcaagacatcctttttctggtgatctccaagctgcggtgttgaggttgcgctttttggtgtactccatggagtgagtgtccccaagaacgacttctgctctgcacccgccatggggaggagcgcccgtcggaaggtagcgaaacaaaccaacgtgaggagctgggttgaggaacagcgaaagtgtcggcacgacgtatgaacacgaatagagaaagggccgcggccaaaaaggtgttcaaaacggtaggcaggtgttggcgttgcaatgaatgtttccaatttttggagatgggaaatgatgtaatcccaatttcatgcaattacgttgtaatgtacaatgttataccgtaccatatcaacaatgtccgttcttgacataggcccgttaattatagatatatacatatttctatataaggtcccaattccatgtattcatctttcattgatagtctaaagagttagggactataagccgtggatacgtcaaattcccgaggtcggcgtatatatggctttttctcagtcaattgtggcgaacaccagcataatgaccagctaggtagatgaaatagtttcatgaaaggtcaccatgttatatatactacatagataggtaactaggtaactaggtaactataacatagtatatatgtaagatgtcgacgtcatcagaagaacttcaacgttccccaatacgataatacgagaacacggcgttactgacatgatacttacgctctcatacaacaatacccctggcgtgatgtactctgtatcgttaaccaactactttcattacggtgtggctcgtctccccctcggttcgtctatacctggctgcctttcgctttgcactgcccaccttgagcacgcatcggatttcttctgatcctttgcttactttacctcttgacaattgatctggctcagggtgtaatctacttccctccttttttttttttgtcgcaacacagtctttccctgggtgaacccctcagctgttttgccccagggttgtgactcctgacaagatgaacgtcttcaagcttcagaagtacattctctctccgttcaataaaaacaatatgctgaccattgcgatccatgtaggcgttttccgcagcttgatcaaggcgagatattttcgctccaggatgcattcaacagattggacgtcgaagaccgtggctaccttgatgaatctaccgtgatcaaagctgctcaacaatcagaacgccagccatatgatgtggtgcgtgcagctttgaaggatgtggagctcgacagctcccggcgcgtggaactcgaagattatgttgatgtaatacaatctccccgcttccctttctcaccccgctggtattaatggcatagcagctcgtttccaagctccggacagcccctactgaaggtgtccgcgcagcagctacccccgcggctgtgatccaagaggccggcgctggccctggagcatctcgacatgtctccaaaggcagtgtgggtggacgaatccatgtccaaggatcatcctccaatgtcacgcatacgatcaacgaggatgaacgaacagagttcacgcgacacatcaatgctgtcctggcgggcgatccggatgttggcaacctcctaccttttcccaccgatacatttgagatgtttgataagtccaaggatggcttggtcttggcaaagttgatcaacgatagcgtaccagataccattgatgagcgcgttctgaataaggccgggaagaagatcaagcagctgaatgctttccacatgaccgagaacaacaatattgttatcaactctgccaagggtatcggatgctcagttgtcaacattggaagcggggatatcatcgaagtgcgcgagcatttaattctgggcctcatctggcaaatcatccgccgcggtcttcttggaaagattgatatcaaacttcacccggagctttacaggcttttggacgaggatgaaactctggagcagttcttgcgcctgcctccagagcagattcttcttcgttggttcaactaccatttgaagaatgcgaagtgggacagacggtatgtaccgcccgagggggacacaaataaagacatatggctaaccgatgtagggtgacgaacttttctaccgatgtcaaggatggcgagaactataccgttctcctcaaccaattggcacccgatatctgctcgcgtgcccctctccagactcgagacttgcttgagcgggctgagcaggtcctccagaacgctgattcccttgattgccgcaagttcctgacccctacctcattggtcgccggaaatcccaagctaaaccttgcctttgttgctaatctgttcaacacccaccctggactggacccgattaccgaggaggagaagcttgaggttgaagacttcgacgctgagggtgagcgagaggccagagtcttcactctgtggttgaattcattggatgtgcagccggcggtcaactcgctatttgatgacctacgcgatggctctgttttgttgcaggcatacgacaaggtcatccctggaagcgtgaactggagacatgtcaacaagccaccagcgtctggtggtgaactgatgcggttcaaggctgtagaaaataccaattattcgatcgagcttgggaaacataatggtttctctctcgtcggcgttcagggcgctgatatcactgatggccaacgaacactcactctcggattggtgtggcagctgatgcgccgtgatattaccaacacactctctgcgctagcccagcgcctgggcaaacgtgaaataaccgatactgagatgatccgctgggccaatgacatgtctagcagtggcggcaagtcttccacaatacgcagcttcaaagacaaatctattggatctggaatcttcctccttgatgtactcaacggcatgaagagcagctatgtggattacgatctggtcacgcctggtcggaccgacgaagaggcatacgcaaacgctaagctttctatcagtatcgccaggaagatgggtgccaccatctggttggttcctgaggacatctgtcaagttcggtctcgtttggtcactacgtttattggtaagttaacactttcgtcggtatggcggaaatttaagtctctaacagatgataggttctcttatggctacccacgagaagatgtaaggaatacaacagctcactttgggcaatcgcaatttttatggcattgcataccttttactttgtttcctcaaatacatgtaaatatgtcgcttctcaaggccaacctaaccaagtgtggatctcaattgaagttttattgttatcatgctagatatttccctctccgattgattaaaggtactgatcaaaccatgcaactgcctacaaaaaagtcagactgtttggcaaagcgaattgttagcttggtgatatctgcgcaaacagcaaattcgtgctcaacgccaccgaacaagttgatctggtacggctggccagtcttggccaggatatcctcagattcatggcactttggggccagaaaaattgagaaaatatttagtcccggcgctataaccggatcaagattgtcggccgtcccaggccgtcctttaaatcttttaatgatgctttacttagatatgaatgaattaatctaaaagataagcatgaccaaagctaccaaaaattccacgccgactccgactagtggtcataaaattgcaaatctcaagggtataatgccgctcaagtgacagaaacaatcagagattctatatgacagttgattcaacgaagttaataaaagaagtataagatccgcggctcgtacccgaaaccggatacaagccctacctgacctggtactccgtatagctggctggtatactgcgagaaacggggtggaaaggagtacagattttgacggcgtaaaacataacacaaaacagcacgaaggcagtataagcaccataatcttgagcaaagtcttgcaaacgaattcacccccgagttaattaccagctgcagcaatggacagcgggccttggattgcttgtaattcctctgcgtcgacgaaactagtgtgtgcgacacaggcaacatcgcagggacctggctggaacagtcgcacggcgtattttgtctatatttgtcaactcgggtagcagcaagatatacgaaacatcaacatactccgaagcaatagccgacagcatcgacccgatcgtagcccatgttggactgtgtttcccttggtatcccttgagccacacgttctacacggtctggcagatgacctagaaggcctattagccagccgaccagatcgaagctagcggggcgattgttcaacggctctgggtcaccgtggaataggtctggcatgacgcccagatggccatttgccgctaattggtttgcaatgagctgcgcgttaatgaagcggtgcggtgagcaacaggatggaacgcttgtggaacgcttggggtgtgaaatgtagacctcaactactaccatcagcgaaactgtagtctatttccagagaatcagaagtatggaaatgacgcaacaagcagccggtgaattagattccattaagatacaatcgaaatagcggtacgcgcgcgcgggagagtgtgcgtacaagaagaatatcaggaagaggaagagtacagagaaagatacatatatatcagggtgggatatagagtccgtgcccgtccaatcggaggcggtataaaaaccatgtagtaatcaatatgtaggcgcaatctatagttatatggatttgttgtttacattgaagcagtaaccatcaacggatattcaggtactgtatcaaatcaaatgatcaagtacaagctgcataacagacttggccctgtaaagatacccagccaaaagaggacattgcccaataaacggcgacctctcatcaggcgagtccggcttagcgcaacaagtggtagctgagacatctggaggattagtaggtaacctcggagccgccggaatatgcacagcatgagaagctcatgtacacatgcagataagagaaaagtgatgagactggcagatacccgcgacaaacggtattcgctgatggagccatggtatacatgccgaaataaaaagttatggacaggacggttccaatctcgcgcgaactgatcccacgagaccgagttccaccaatcggaatagaaccctcgatctgcaaacatggtgatctcggccacagcattaagctagatgaacttagcaataaatcaaggtagcaaacagtcaaagagacttacaacacattcccagatcacgtagaatgccagtagatactccatcatgaacggaaaaagcaagtcaccgagaacccaggggaattcccgaagtctctgctgcgcggtcattccctccgctttcatacgcacggtgtccatcaccaccgggtatatccacgattgagagactgcaatcataactacaataacgccgaatgtggcgagggttttctctgcgacatagagccaatcaattttgttggtccgcgggtattcgagctcataaaccaatgtgggcaatgccatgaagtcgcagatatttcttattgtcaagttttgaggatagtgattgttggttagggagcaccggccctttaatccctcagataagaccttgatctcctgctcgagcagttctctgagcgatttcacctggttaggttcaagtggcacaccggtctctatcgttctaataagagataaaagctggtcggtttcatgagatcgagaatagttctgtaggtcagaagagcgttgactaaagtcttttctcttgaggtctatgatctcagcattgacttgtgtatcaattgcagaagagtggcccgtcttggtagaagtagcatgtcctctttctttggctttggtttggccaagacttgctttcagcatatctcgtttgcgatacatttccgatactgccctcattagctcctgctcacaaccggacacaaattgacatacaatagccattgtaagctgcatagctgtgttgcttcatcagcatagccaagcagtgtaatacgataaagaccgtgtgtgtccacggccaatcgcgatggtatgtccaccatataacgactccaaggtatgtagtttgccagatctgcacaggtcagcaatgtaacagcgtcaagggcagattttaagactgacattctgaataagccagccgagaccgttccagcgaatgtatcccctgagtatcactcgttgtagtatcagacaaaaccccgtagaccaacaaaggagcaagtcagtcagtccaaggaccatgacatctttatccatcataagatggataatctcattcttgccccatatgctgccgtaagttctccaattgttggcagcaagcctgaacaacatcaaggtcacccccatccagaagagaacaaaaaatccatggaactggggggcagtggttcccaaattttgaaaagtactcagttgtcgggtaaatttcaggtcttggaacctgaatttccgtttctcacccgactgatgtgagagattgtgcttgagaatctcctgtaaaagctcggcatcctctgcggtgagcaagtattggccagcttgctcagtctcggtcgatgctggttcttccaagtccatgattatgcatcatatactccgtagatagtttcaaatctcaggtcttagagaatggcggcctctgtttttctttccccttagcgcggcaaatgcggcaaatgcgataactgcgtcaaatgacgttctgtcgagatgtggttcctagattggagtatccagggaagaggaaaattatattcgaaagcaaaataaaagtaacaaggaaggtcgggtatcaagtcgaaagagtagacattcatgcaattatatagctgagcttctatcgacttgtcatgcttctccgccttagctctacccctggagttgtttggtctctctcttcttcttattaccattccttaccatgttaccatccattggcccttattcaattgaatcatggataaatcacaaacgccccaagttcgtgtccctggcgaaacccccgaatcaacccaacccgaacccaatgcgactgcgaaccacaattccaccgaggtagagatgggagaaacacaggacacaagccaacctgaacccgaacatgtgcaagaagattcgacactttcagatgtgcaggcagagccagaactacctgctccggcaaaaaagaacgcgggctgcaacttccttgagtgagcattcttttcctaaacatttgcgacacaattactttttcaagatggcatcacctttcattgtcccaatcattactcgccagctcacaacaacttgcagcttcctgacttcacctatcgttgagattatcgttgggaaaggcgacgatgagaccgttatgacagctcatcaatccctcttgatggaagcgccactactagccgagttgcttagaaaattcgaagcgtcaggcccggtgggttctttagtcaaaatccgttccaggtatattttcatatttattatactaattggttatgatcaatagcgacgcatcaacctgtcagaagaggacgttgatgccttcggttgcttcctccagttccaatatacgcgtgattacaccgtggttcaaacggaaacacccggggaaacagttgaagacaaaagcggcgacgagttgctgcgccatgcgcgcatctacacactggcagagaagctaggtctgccaaaacttcagcgcattgcccatggcaagatccataaggtccagagctcacctgatgcggagctttcatatgcccgttacgtatatactcatacaccagcaacagacacgaccattcggaagcctgtggcgacttactgggcgagccaaagccacttgctgcggcaggaggttggggacaactttaagaagctgtgcattgaagtgccggagttttcctttgatgttttgactatcattctggatcgcaagttgaagaacggatcggtggatgagatcaagggaagtgcgcgcaagcgcagaagagacatctagttattgccagttgtacaatcacatatccgaggatcaacgaagtctttttattaatttggtatgaaccttcttgaacagttcaggggcaaatcttgtcaatggccgtagggcctgctttttataaggccaggctctccacctcctcaatgagtttcggggccgtggtcagattctcagaaccgtccttggtgatgtggatgttgtcttcgatgcgcactcctcccacactccaataccgctctaagacctcggtatcgatgtacttaccggtctcgggggcctttaagacgggatcgataatgaagcgacagaaatagatctggtaaataataagtattgggggttgagtaagagggttctcatggggtgtcacttacaccgggctcaacggtgaccacagagccagcaggcaggttagcgcggacacgcaggtagcggaacatggtatccttgtcctcatagttggggttaccaccggtatcatgggtgtccattcccaggtagtgaccgaggccatgcgggaagaaggccacactgacacgcttgtcgaacaattcgtcctcggatccgcgcaggatacccagctttaataagccacggatagcaatgcgatgtgccagcgcgtgaacgtcatcccagcacacaccttccttgagcatcgcaatacattccgtctgcatctggaggacaatctcgtaaatctgacgggtctcgggcgcaaatcttccatttagaggaacaactcgcgtgatatcggcgcagtaagtttggtattcgccgccagcatcgatgagaacattattcttccggcgcttagtgatggggtcgaccaggtcaacatcgtttctgacatagtgaagagtagcacccccctcgcctccagcaacgatagggtggtaagactgctcgcgacacccattggcaatacaagcaccgataatggcagcctcaatctcgcgctcgttagtcgcggttttggaggcctgaatagcagcaatgtgcgctttggtcgagatatcgtttgcctttcgtaaaagcgcaacctcgtacgcatccttgatgacacgagtctcctcgatggcggtcttcaggctggtagtgtttgtttcagcgaagccatggaagcttattccctccgacacctgttcggcgattgcaaaaacagcagtttgtccattgtggtttgaggcgatcgacgccaaagtcgaattcatatcggttgtgaacagaacgcggtccacatcgtacaccttggcagcctcatcgagagacaggggaagaccggaccaaataaccgactctgggttgatcggtggaataaacagagtcaattcatctccgacggcatcgtataccacggcggcattgggcaaaagacatccagtgagatagaagaaaggacgacgttgcctagaccgggattagtgtcagtccagatcctacagaaatgctgcattacctgaatggcatatcctcatcgctatcctcgatcaatcgagttttttgagcctcgaggtagataactccggccccgccatgccgggcctgaagagactcagcgacacgaagagcatgggccttagccggatacttggcagcgagaatggtatccacggtagtcatgtcgagtgaatagtttaagtgatgaagaagaagaagagagatagagagagggagacaaagctgccagctgttatttacaagcagacgaggttacattgcggggcttagaaattatgcggctacttcagggctgccgctgtcaaagggaaaaggaaaaaaaagaccaacacattcacatccgtggagatcatacattatattattcggactcttcatccaatccctctaggactagctctctgaagcagatacatcttcaaactccatctcccattggtccacctccgcaaacttcttgactgccgcgcgcaactcatcgctcacgcaacgagtggcctctgattctgtggattcgaaatcagatatgtcagactcaggtggtgatgacagtggagaagatgatggggatgatagaagcgcttcgttttctttgttgacgccactcgcttgagaacgtgaatacgtagctggttgtttgggacacgatttgtccttaattttcttctctttaatctccttccgcttcggattgcgagcatcggctaatggtttgagcttgctttttcctgcccgtcgcccagataatctttgtgatggatagttcagctcgtcctcgtcgccagatgcggcatcatgctgatcatcactttcgtcactgtaattattggtggcacggagtctgtgccggcgacgtggtaaaagcttgtcttgtaggtttgctgtcgatagataactcggggctttggactttttcgtctgaacaggtcgcggtgtggagtcgccaggtgcaacggagcctgcaggactactggccggtggtaacatagtctggctcaatatttctggaaatctttgggattgtggcgtagcctcgactctttcaatctcagcctcctgatcttcaaattcctcgtcttcaggttcgacgtcctcattttcaggaagttcgtctccaataacatgtcgagagtcatcgtattgaaccggtgtcgcagttggagtatcttctactatatccacaggtgactgtggtatttgaatctcttgggtcatgcgcttgcgcttgcgcgacccgccggacgagagcggggatgcggccggtgacggggatgaattttcggttggctggataagtagtgactttccccgagagagattgagtggtgtcgattcatcattggggctaagcccaccaaggaagtcatcatcatcaaggtcggaagagccatcgtcgtctgcttgcatcatttgcagaatgctttgctgtcgcggccgccgcctgaagttgctcagaaccgaattatcaaatccaggcgttccaggaacccgggagtttgtgtcacctttgcgtccagcgaatgatagcgtagaggaataaccgcgcgatcttgtagggggacgactgccggttccaggtcgactgccggtgcctggccggtcccccgtaggtgaagattcaatcgcttgttcatggcttttagtcaagggtgtttgactgcatggcgcctgtcgcagatccaaggccgaggcacgctcaggctgcacgggcgattgggcgacattggggtcaatttgctgcgttgagtcttctatcgcggtttttttgtgctgactctttcccactgtacgacttcgtttgggggctggacgaggcatagtcgaacaaattgatttgagccaacggagtatgtgatagagccaaaatggttgcgcagctacaaatgcgaaagaagatcgacgcgtttgtttgggcgcggtgcacgtggaccacatgtgacagcaaactcgatacatactatctagtatctagtactccgtaggtcaaacgtacaaagtactgacatatattacttgatatatatttcgtgcaaatgccgattatattctatatctactagcttacttgtgcttttattcgcttacatttttcctatccgatgtgctacggactcaccctcgtaccgagttgggccaactgttatacaagctcggaaaggctggaatacattgtcattggacgacctcgcatatatatcaatacctgtgccctgaattctccgggcaattattttggatatccctctccctctttatgtctatactcatctccaagtatggtctgatgcccgtcatgctgaccaacccctttgggtggaatgcgacgttaaatacaactagacacaatcccagctttgaaaaatgaatttgctcacagagaacgcgacgatagaccccatcggggactatgcagttagcgacatatccatcggcaagaaaaagcgctctaatgcagaagctgttgaatatccaagaagacggacaacaatagctgtaagcgcctctggcacatttgaccaaagcaggactcttcaacaactagtgtcagacatgccggctacgcaatacccgatgtagtggagttcgtgccaaatgtgttccgatttgaatgcggaatgtgtctatcgagaacctggtatcaaactcgacactggcggcaaactcatcctagatcatttggccagaattgagactttattacattcgaatttacaaaatcaagagccacatttagccccgtccgctacttccccggccaccagcaacgatacaaacctcggtagcgatgatccgtcaacgagaacgtcatccagaggcttaccagtccacagaagattatctgctgttgggctcagtccccgggtccgcctacctactcttcatcccctccatttgcctctaattcgggacttggtctctcgcctatgatccacagcatcttcttcaattggagtggcccgcgaactattgcggcttactccaagttcaggcttttattttgaaaatgcatctacatattctcaggcagttttcagctatggaaacgcttggtacgcctgcgtgaacccttagacgtggaatcgatattgtcaatcagctctcgcgcaaagatatcagaaaggacacatgagttgtcttgttcttctagttttggctctaggaagtgccagtcatagtcgcggtatcttgtttctgtcaccagatcgtgaaccgctgggacttccttattttgccgctgcgtggggcttcctactgtcggtcatgatacgaaatactgtggttgcggtgcagcgtcgtcattacctagtgtggctcctggaagcttggatcttactatccagcgtgagtatgaaattgtagttgttgtttggcagtccgaatcggatcccgactcggtggagagagctgagtgtgaaggtatactggaatgccttgttatttgaggacgaccttcttgcagaattagatctcgcccattcgggctttttcgactttggagaactcatggatttgcggggagttttcgaaagaagagaggatgatggagagggggaaggcgtggatcataacgagggcgaagaacgccaaatagccaggaattatcagggttcatcacgcccggtagactcttggctggctctcaagcgtgatggactctggtacttcctggaagagattgggctacaaaggctcctcaatcgcgtcagtcatatcatttatcggaaagacagtgcctacactctcgcctcattaggtccgattgtatccgagctcgactttcagctatctcgatggtatgaccgtcttcccgggcccgttcaattccctttggccctaaatcctctttccaattcggttcaaacggtgctggggcttcgctacaatgcatgccataccattatatattttccatatatcttagctgtgtttgagaatgaacaggctggagtgggtgttgccggtgatgtttggatgctatactccgtcaactagagccatataaccagccatcgagaaggccaccttccggtgccctgtcaatggtatcacagacgttactgataatgggtgccacgatttctcctaccttctctatcctgcaaccccctcccccccgtttcacagatagatgcgatcatggcaggcgtggtaaacgaaatacagaagtatgcacacctaaagatgccagccgagattatccgagatggaaagaaatgacgacaaatttgtcttcgatcggccaatatgtgcttctgaactgctgatgactgatggctgaaagatttactgctcaagaatgatagtgatctttgtatatatgaacgcgaacacagtatgatgcttgtaagtactgaaggattgtagtaaagtgtgatatgcattagagtaagtcgttagggctcgcaccgaggcaagaccaccaaaataaacagtttatatggacaagaaacaaacagcgttaaatacaatcccttctcatgacaattatgttcttaaatcatcaaatataaaatcatggtatctcaaaagacatggggagatcgaatatggacatcagaaatatcaaaaagaacgcagaaaaactccaggtttccagtggctcggaagagggaagagaggggnnnnnnnnnnnnnnnnnnnnnnnnnnnnnnnnnnnnnnnnnnnnnnnnnnnnnnnnnnnnnnnnnnnnnnnnnnnnnnnnnnnnnnnnnnnnnnnnnnnnnnnnnnnnnnnnnnnnnnnnnnnnnnnnnnnnnnnnnnnnnnnnnnnnnnnnnnnnnnnnnnnnnnnnnnnnnnnnnnnnnnnnnnnnnnnnnnnnnnnnnnnnnnnnnnnnnnnnnnnnnnnnnnnnnnnnnnnnnnnnnnnnnnnnnnnnnnnnnnnnnnnnnnnnnnnnnnnnnnnnnnnnnnnnnnnnnnnnnnnnnnnnnnnnnnnnnnnnnnnnnnnnnnnnnnnnnnnnnnnnnnnnnnnnnnnnnnnnnnnnnnnnnnnnnnnnnnnnnngggggggggggggggggggggggggggggggggggggggggggggggggggggtattatcgtatagcttcacatatatcctaaaccaacacccactcgctacctcgcttgatgaacttgtcgagcatcaagcccacatcagccagtgcgaaccgacaaatataaaagccaaagaattctgcagcgtgtcgtgtgcagagttccaggccaacatgggttttggacgaatgtttgagtccagggtcctcaacttgctgagcaatttgttctggtaatgaattagaatgatgtcaaaacatatagacgagaaaggtattacctagcacttgtgcagcatcgaaaagccgcgccaacgcgcccatgtagttcgcgttggggccagaaaattcaagctgggtgacatttcgcttcgcaggtgttccatgtacagatgtcattgggacagaattgaggactagattgtccttgctactttctcgagcactcgggaccggggtggttgtcccaagcccggaagtttttgcgcgtaatcttttccatgtcaaataggacttattcggcgcaacttccggtgggacgggttcgtccggtgtggaagcgggcttgaacaatggcattgatgcttgaataccaacatcactgcccaatttcttagtcaaggtaacctgaacttggtcaagtatagtatcaaacgactgcatctcctccaaaaccgcatctgcatcatatgtatcgacctgggccaatttgagcagggcggcggtcagaagatcgcagttggacactttctcttcgagggcctttaatttaacattcttcacgcgccagacatctcgaggaataaagagcttctctgacagatatccaccgtgaggatgtgcgagtgtctggtagagacacctcattagccaaaatggacggagaaggaaacactccggacatggctctagaggaagcggggcattggctaccaacgaatttggacgaccaagagctgtgggtgagtgaatgttactaccaaatagatttaatccgccacttggcagtccattttggttgaagttgaagttagctagggtcggtgtgggtaaaacagggacgccgctagtggcgcccctttgggtgtcggggaatgcaccgctccacggggagcttggggattccgggcacatatcagggatctgaatcggaacagaggcattccgagctcggaaaggctttgtattggagtggagtttattcaatccatctggagccgagggtactttgcccatgggccgtgctgacagcggcaggggtggcagttcgttctcaccatcttcatgagtacgagatttggagaggttgacgtggtccgtgaaagaacccaccgacggattgcgttgtgttggatgcaaagtggaacgggccccaggagcagaaagttcgtctttcggcaacggtagcgggcgatttgccagtggggttgcaacattttcaaaagccgatgatgcattggaattcgcgcgagaggagcgggtattgatttcgattttaagctcgcgagtctgactggatagtctccgggctcgcactcctggacctgtagaagaggcgagtgagccgatagaaccctcacggtttgataccgaggtccgctttgagggagctggaaagtcggatgatgctggcaggggcggcaaagccgaagaaggaggagaagagggcatggtatatggttcgggccttaggtcgcctagcggcaagacatcgtcttctgccagcgtagacagcacattcccagtgcttgcggagctttcccatgtcctcccagacatgttgctagaatccgattctcgaggaagtgccgacttggactgaatgccaaactcaaagtcatccatcacgtagcccttggtcatctcttctagcaaccgctcctcttcctctgcttcatcgtccagatattccgaagtacgggaaatggggtcatcccacaaagtcgtctgttcctggatgcggcgcatttcacgatcacgattcattgcctctgcttcctgttctgcctcgcgcactctttgcttcgctaattgaatgttcctgcgagcatttgacacaatatcatcacgttcctcttctctatgctctagcaccggctccagaccttcatcatatgcagcttccacggccgcatcgagtgccgcatcaaactcagcttcggtgtcattactgagtcgacggcttgtccggcgacgaaggtacaccgatgacgccttagaattcgccgatgagggtgacgaaccgcccgattcatcaattgtgtccaaccatgaagtggattcattgatgtcctcctgactacccgtcggcaatgtgatagatcggtgttgatcttccaaggcagacggcttcaaggattgtcgccgagggggaatcgcttccatagaaaatccttttgcctcttccagtgggatctgatggagcctaaagctggaacgaggcgagttctgctggctctccatatggaatccgtcatttgtcgaacgaagcaattccccatatgactcttggctgaggggccgatctggaagagctttatcgtcgtcttccgggagaggaaagtccatacgatgaagttctgtgacccggagcatatatgtgtctcggatttcttgaagtttgagtttctcttcgtctcctccattgctacggaccatgacaagctgcagcaagttgcacgcgtcggtgtaagcttccattgcaccctcaaaattagcagcgttgtcaagaagaacggccgtatttgctttctgaagtgcctttgacagcatcaccttttgggtctgtccatgttgtatggccacggcgtccccgtccccgtcatttaaagaaatagatcctccactagatcgagaagttggcatatctggtttagtgctatgtgttgagggctgaaaaagatggcttgaggccgcaaatgagagatcgagttgttgtgatgtcgggtcatggttgaatatggcagacttctccatctccggcaaatcgaacatcggcaacccattcagtgctggcgcacgttgcgggctgtcgctctcccgtccacggttataacctgacatggacattttcgagctccctcgacgatgatgaccgatgtactccgagggacttttgctagatgctgttgactgggaccaacgatttaagctgcctagcccttctttgatagggctggtggctccgaaaccctccggggacatgtttgccacattctctgtaagtacaccgaggccagtgggtgtgaccgcacctggcggctttaccattcgagtccgagaactagatcgtgacgagcgagaggaaggccggttatgggacggtccagacagcggttccgatggaaagggacccgaaggacgtctgaggtaggatggattggggtcatcatcgactgctgtgtggtgaatcattttcgcaagacggtggaatagcggtcgaagtttatcgaatgatttagatgtcggaaatgggatatatcaagtctctctgaaattgtgtagccccgaggcactacgcgcgaccagacaagcacaatatgagagagaaatgggtatatgcaaccgggccctgtgtgtcttcgctcattcttcgcaagtttaaagtgttgatgtggtcgtgtctcgtagagtatgtatccttgcttttgaaaaccccctctccgtctcaatacatagcttcgtaattggaagggctcgaggagtttaaagcagtaggctgaaagacattatttcaattgacctggaacggatcaggaaccatgcgcattgaagatcaggaaccaaactcacaaatcggggaattttcttgcgtcaatcacactcgcaaaatgcgcctcagagcaacaagaatctgtcaaatccgcagaagggcagactaacagttgccacttgtgggggttcgtcaagttcgtcagggaaggggggggggcttgaactacttcagggggggggttcccgggtgccgggcggtggacgaatgagaaaaagcgatgcggggacctcggaaggatacgatgagttctgggagattagaagaagaaatagagaggaataatggatattgaattctggagtctggagtctggactcccaagggagagggaaaaaaggggacacttctccctagcgcaggctatatacatacagggataagctaggttattgtgcataatacagagtagaactaagaaaatatttcaaagttgaaagttggaacgactcgataggtagaaagctaacagacatctaaatacataaatatctaagacaagtgtaaacgcaaatataacccaaatcacgaagttgacgcttagcgacgggaaatggggggaaatggggaaatgagacagatgagaggggagaatttcctccctccaaaaaaacctcatgaatcccaccttgggtcgttctttgactcggaacttgaatcctttccatttagtccgttctataaaagtacaattcacctcaattcgaactatggctactatcaatcctccgcgggatccgaataccgtgagcaactacaacaattggcgttccacccatattacggccaatttcgatattctgttcgatcagaagaagctggtgggaaatgtcgtctatcaattcaagtcaatcaccgatggcgagtcccaggagatcatcctggataccagccatctcgacattggcgcggtgaaggtggatggccagctatccaagtgggagtttcttccccggctagagccctatggtgtgccattgaagattcgccttgatacgcccgtcaagttaaatggtaccgttgaggttgatgtatgtttcataatcattatcctcatgaatctctatctcattcaaatcatagatcgaggtgaaaaccaccgacaagtgcaccgcgttgcagtggctgacacctgcgcaaacttcaaacaagaaacatccatacatgtgtatgtgacaatcttgaactcttcttggagctccattagctgacaaacttgcctagtctcccaatgccaggcaattcacgcgcggtctatcttcccttgtcaggacactccggatgtcaaagccacctttgacttcaacatcacctccccgctcccggtcatcaccagcggcctgccgattcgcaaggagtcaatggagtcaaaggcggaccgccaattgtatcgattcaaccagtcggtgccaatccccagctacctctttgctatcgctagtgggtaaggattcttccaccattctcagaggtacggttcattaatgcagaactccacagtgatgttgtcgaggctccaattgggcctcggagtgtcgttgcaaccagccctgacaagctggaagagtgcaaatgggaactcgaggctgataccgagaacttcatcaaaacaatcgaggtacacagccgatattctattcatatcaatgttcaattctgacattgcacagaaaatcgtctacccttatgcctggggtgaatacaacgttttgatcctgccgcccagtttcccatatggcggcatggagaacccgatcttcactttcgcaaccccgagtatcatctcaaaggtacgtagtatcctctacgcaatagttagatggaccatgattaatagctccctcaggaccgtgagaacatcgatgtcattgcacacgaattggctcacagctggagtggtaacctggttactaatgcctcatgggagcacttttggttgaatgaaggctggacggtttaccttgagagaaggattctggctgcccttcatggcgaagcctaccgccacttttcggccatcattgggtggaagtctctgactgacgctgtcgagcattttggtgacgatcatgagttcacgaagctcatcgttgatctgaagggcaaagatcccgacgacgcattctcaagtgttccctatgagaaggggttcaacttcttatttcaccttgagaatattgttggcaagtcaaaatttgacaagtttattccccacgtacgcaatctctcttctctcgttctgtttcttttattaaccctttcttttgcagtatttcacaacctttaagtgcaaatcactcgactcttatgagttcaaggcactgattctggacttcttcaagtcagatgccgaggcttccaaggtcttgaacgaattggattgggacaagtggttctatgcgccaggtttaccacccaagccaagctttgacacatcgatggtggatgttgtttacgaactttccaagaaatggcagtcccttcccgactcttccttcaagcctcatattagcgatatccagggcttgaccgcaaaccaattggtcgtcttcttagagcagattctcttgctagagagaccactcagccctgaagtctcgaagttgatgggtgatgtctacggtttgaccgagagcagtaatattgaagtttcgcacctctactgccaagttggcatgaaagcaggagacgacagtgttattgagccgacaaccgacttgctgggccgcgttggacggatgaagtttgtgcgacctttgtaagatgtccccgtgttaatcgcagattctgttcttgatactgacttagcattttttcttgttctttaggtaccgcaatctccagaagatcaatcgccctgtcgccctcgcaacattcgagaagaacaaggatttttatcatcctatatgccgagggatggtggagaaggatctgtttggcaagaaagacaactaggtctttttctctatgtcgtgttttactcgaataggtagacatgaatgctcatcggtttgtgtgccgtggtctttggatagtaaaaattgttatacaacaagactagggcaattaaatattgtacatgtctttgtaatcaaatgatataagatagcagaacggataccacaaatgcaaactactcacttctgcgaggatattccatcatttgtttgcttgaacgagtttcttgtccgtctccgagtacgcaaagatgccggtgttcttttggtcacgcccaagagagaaaacaatatccacctcgtccttcttggacagctctgacaagactcggcgcatgtaggccaccacctgcgcaaccttggcccagtcaatttcttctttcccatccggtccggtctgacttcccttccagaggtttctccagacagcagcgcccagcaccgcatcgcctttggccagcccttcatcatatgcagcaatgattccacgccattgaatgaacagatccttcaggtacttgttgcgaatagtgcgactacccagatcatgatatgtgtccatgcggtgttccgcttcatgcgaaaagtgatcgatcaagtggcgggagtaggtagtaacactatcgcgatggggcagggcacgaaggcgaaccgttaagaggtacatgtggaggaaagtcacctgggaccaggtagaaaaggttggcaagaggccgagctctacagcgacgcccgagattagcttattgtcttcaaagcagatcatcgcctaagccagagaccgctcgtatcgtctcacctttataccaccaaccctctccaacaccaagatcttcaccggcttctgttttcgggacctccactcccttttgcgacgcttggggaattttgtaatccgcttggctggaacaggcctcgaatagcttctgtgtcatgccatacgcaacataagtctcggcggcatttccaggtctccgggaaaagttcttggccaagtcggagaccttgccttgcgaatatgatcgagtgatgatcgatttcaatggctgttccgtagacacgcgggaggcggagaccagtgttatcgggctgcgactagcagatctggaaaggcagaggttctggaacccacgaatctcgcgcgcccatagtgttgatactctcttggataacattgctgaggatgtggaattcgtgaattggtctttcgtgattggtgatctggatctttttctgataaagtatgtttgcattgtttgttccgatatcaagacaggaatttaaccttacagtcatgtttcattagtatttaaaccccagtacatcggaaggcctaggacccacttattttcggccggtaggaaacttcacattcaaaaccccttttaggtatacaggtaactagtaactagtatgccacccttcgtacctgatcacctcttctacacggtgtggcatagttactaacttctacgcgtagcgcgcgcgtactggcggggtgtatactagtaggaataggtaggcggtgtaaaaaagcggttagtggtcgaagtaccggggtttaaatattaatgaaacgccactgtagacctccagggttgcgtatctcctaagagagctagttaggtactgctgaatttgattgtatttttacccttgtatgttctcggtggagctcctgctggttattcaattgatggtttagtgctagtatctaacttgagctcttctcactagttaacgtaattcccaagcgagctgcgcagcccaaaatacatagtaaaagcgataaattacaacatgatatctcagcaatgatggtccttaggaacttgtctttatagcatagtactatatatatgatatatagcatgtctagggagctttaggaaaatttatggctttataactgcgatatatatatttctagcttttgggaacgtaattttcggtaatatttgaaatgacagtaagatagtattctactctccttgagattgatatatagtactacagtaatatgtcttatcaataatcatcgacaaatgggggaataggataaacatatggttgttgagatataaatgtagaatgtgtcgcatttactaaatgttctaagctgcgcagctcgcttggaaattacgttagttagttactaatggttaactatgtaatttatcacttgtattcttgtgccagcggcagagtatgcccaagattgcaatatgcgtaagtatctcggagcccctcggttagtgttgcgtgttttttttgcacccttcgttccgcctttcaggacaagagaggttcacggtctacgggtaggtaggtaggatgcgataggtctagtgacatagtaatagggacatatttattacgaagatagttaaggacgctcttatctctccttatcctattataatctgcatcgtttgtatatgtctcgtgaatttaatcattaaatgtggcagtaggtccgtaacctaactagccaagtctaacaaaagactcatgtgggcgaatatgggatatttcattcccaatgctcatgcgtatggtcgtcatgatccagtggcatgtttcgtttgtgggagacgattagttgctaaatggcgaacatcccatgaccgtgacgtctgtatccaagcccaatggttgactgggccccgcggataaccagaatatgaagtgtagatctctcaatcgcctagcaccaaccgctcggatcgcttttctacaagggggagaatctcagagagccggttgggatctctcaagaaagctggaatatcatctctggttgctgctagcatctgtggacgactgtcagatcaaacacacatccaacgttatccaacggccacacatacctgtcgaactttctcatattcacattcctttgagagatattctcgaataacttcacctgtggcaaagtccacataaactcgagtgtcccggagtcggatcaaaacgtgatcaagcctcatgaagaatcttgtcaatagaagaagtcttcctggcatgactcggatcttgcaagacagcatggtaatcccattgtccgccagctcatcttcataaagaacaacctcgtcaaaaaagaggatgggatctggacgcttcaatagttcaatcggaatgggcttcgtcgttggctcaaacggccgcgcattgggatggagggtgcccttgtagtcggtgctatatgaccagtcgaacggcttcacgacttctttaatcccttcgtgtgttttctctctgcggaacaagccattagtcgcaacgatcgataagcagaaatttagacggctgcaaaaatacctgctcttttgccattctcccgagtacgcgacctggagcatggattgaccagtcttgtccaccaagtccaaggcatcaaacgcattgaaattgatgccccaattaccattctcgtgctctattgcaacataattatcaccaaagatcatttctgggggtgcaatgccgagtttctgggtcatttcctcgatcgggtcggctttgagaataggtagcttctgtgttgaaattcgaaacccgttgatggtgatcgaatttggtttctttgcctccggagagaccgtgacacatgctgtcgtcattgctaaatcttcacaagaagcagcgagagatcaaaaacagctgagccagtttgcagtgctgatggcgataaccccgcggacggagaaagaggcggtccgaccctgcaataatatttgttcggcagaatcttgaaagctttgatttggtcaatgggtctgccattttcaagtctttcataggtagtatcccactgcattcagaatgctgtatttgaataaaaccctgacatggttgtcgtcacctcaagctgcaaaataaagatactcttcgagcatacgattggtacggaaatatgtgtaggcgccgagagcggacaggatggcggtgtgatagccctgtacgtatattacatcagccgggcgttgctggggtgacacgttctgggaatcgcccaaacacccgagcttctgtttctccattttgcgatatcctccatccaccaacgactgacttcgtgcaaagtgatcatgattgctctgaactaagcctaaactcaattttggctacttattatacaaccctctttttcccatctcttattttcacctctcctatccaccctcccaccctctcaccatggcaacgaccaagacgctcgaagctcgctttgagcatctgtccatgaaagacgagaaagagaatggaaatagtgatcgaagctatggcaagcagaaggtacttggctcaacgcaatctggttggagatccaccttgctgatctgatttaccaaggtcccggtttcttcagcccagtcaaacagcaattcaaaccgagctcagctactgaaattggctcttcaaaataataatgaaaacaaggcgaatgccatgaacgttgcagcctcgccaggcaagggatctcacggcgcattggtgacccggagcaccgatgaaaacggcgaccagcgcagatcttcttccctctgcgagcagccaactgtggccaaggagctgcacttgggaatgtttgaaattggtaaaccactaggcaagggcaagtttggacgagtttatcttgctaaagaacgttcctctggcttcgtctgtgcactgaaggtgctacacaagtctgagttacaacagggtggtgtccagaagcaagtcagacgtgaaatcgaaattcagagtaacctgcgtcaccctaatgtcttgaggctctatggtcacttccatgacagcaaacgaatcttcttgatcctcgagtttgctggccgtggtgagctatataagcaccttcgcaaggagcatcggttcccggagtggaaggccgcacaatatattgcacagatggctgcagctttgaaatacctacacaaaaagcacatcatgcaccgcgatattaagcctgagaacatccttgttggcattcacggggaaattaaaatcagtgatttcggctggagtgttcatgcccccaacaaccgacgccaaacgatgtgtggaactctcgactacttgcccccggaaatggttaatcctggctccaaggacaactactacagcgagaaagtggatttgtggagtctgggcgtcttgacttatgagtttttggtcggcgaggctccattcgaggatactcctatcatgacccatcggcgtattggcagggcagatatgtcggttccctccttcgtgagcccagaggcaaaggaccttatcaaaagggttggtatatctttctccattatctatggcccgcatactcacatattatctagcttcttgttcttgatcccgcgaagcgaatcccgctcgaggagatccagcgccatccttggatcctcaagcactgtgtcaaagacgatcgagctgtgaagcggagttctgcttcttccaaggagggcaaagcatgaaacctgactttgacctttacatggtagactttgggggttctagtttctttttgatatttcctcatgtggagttttggtgtctgagcctcatgcattttcaaggcgtgttagattgtcttggagtccagctgaagaggtactctcgatatggcgatattttgatcttaattttattctccgacgtgttcaatacaacatggcacattcaaacaattccacaagaagccacggatacctatgctctctgagatatttgcatctataaccaggacggaggacggagaatactatcggactggatctgtagttgtgttcttagacttcattgacaatcaccatcatagaccaggtatattttgatctcatctcacctttagtgctctcaatcacatgatacatacataaccttacatattttaacaagtaacaaatccgaaaagaaccccggtagatgggcgggaaggtttgtgtcgctagtgaaactcatgaaatatagtacatccagacaatatctatcatacaaagggcgagaatagtacaacgctgcataggctgcgtggtatcatcgatagatctcatcaaatgggcgtgtgtctctgaaacaactatcccaaacttcattgacgacccttgtggcatgggcttcgtctttacaagttgggcgtgctcgcacagagagaatggctctccgtcggacgcattcttggtgctgttgtgtaagcttccactgacctcttcggaaaaattcgcgcgcccatctgcattcgccgctgagcgaactagctcgaatctaaacggatttagcgaatctcggcaatttaagaagggttaagaagacaagaatgacacatacctcggtacaagcggcatgccgaagattatcagaccaattcaccttgaacctgaggtgatcaaaggcatgaaccatctcatgggccatggtatcttcgaggtgtccctggtccttcatttcatttgcgcagatcaggattccatattccggatcgaagccaccacccttccgatcagtgcaacgacgacagtagatgttatgattgtcaagatcgcctcctaattgttgaatgctttcgctgagaaatcgaatcgtagggccttaataaatcgaccatgtcagtatccagctagataactcttagacaagggactcactatattgaagaaggtaatcccgctgatcctcacagcgcttgcagtctgcttcttcattgcgagtgtctcgcgcaacacggaactgctcgattgcttcgttggacatcttgcccgtgagaatcgaatagatattgcggaattgggtccaggtgtcatcaccgggaagaaaccctgtagtttccggctttccattggaaggtgcagccgcacctggcgactgggagtctgtcattttcgatcgtggacttgtggagagtcacccatcactccgcgcgataaatcgagatcctccgcaaatggcggtagtgtacggcagaatcagcaccggaatctggcaaaatgggctcttccgtgattcatcaccgcggggcccacaacacaaccggcctttccaattcttttcgtttgtttcttatttgtttatttgttactgggggttttattggaactggaatttgcgctatggtgacctcatccagcctcacaatcgtgatcaaattgggtgcggggatctatatctgttgtccgatgactcaagtactgaccactcgatatatcaggaacgagttcgattgttgacgagaaaacccacgagcccatactttcgatcttgacattgatcgtcgaaacggtgaccaagctacacagagatggccaccgggttgtccttgtatcatctggtgccgtgggggttggtctgcgaaggatgaatgtagacaaaagaccaacatatcttccacgcatacaagtatgtcttcgattctacaggaatacaagcccatataatatgtctaatggaaaagttgctaatgaaatctgtaggctctcgctgcagttggccaatgtcgattgatgagtctttgggataatctattctcgcatcttcgtgtccctgtggctcagattctgttgacaagaaatgatattgctgatgtatgtacccttatacctgcctagccctgttcctccactgacactcattacagagaacccaatatgtcaatgcgcaaaatacattcggacagttgtttgatatgggagtgattcctattgtcaatgaaaatgataccctggctgtttctgtaagtaagttccccttcgagtcgcgatctcgcatctgacccaatcatttccaggaaatcaaatttggcgacaacgataccctttctgcaattactgcggcaatgatcaaggccgactatctgtttttaatgaccgatgtcgactgtctttattcagccaaccctcgaaccaacccagatgcaaaacccatcgaggtggtgaccaatatatcctctctcgaggctgacgtctcatcagcaggctcctctctcggcactggaggtatgagcacgaagattgtggctgcaaagcttggaaccagtgctggcgtcactacagttatcaccaagagctcaaaaccaggcaacgttcatgatattgtgaaatatctacaatacctcgaggctcggtcaaatggcgtagcagctgacgaccaaagtgaggcacccactgcccctctacatacccgattcatccgttcagataccccgattcaatcacggacattctggctacttcatggactgtacccacatggtacattatacatcgaccacggagcttaccacgcactcttgaataatgccaatcttctcccggctggagtcgtcggggttgaaggccattttggacagcaagaatctgtgcggctagtggttgttgatcggccatccccagatgccttgaatggcgattttatccatcacagagaggaacctaaggaagtcggtcgcgctctggttaactacggaagtattgaaatcacacacattaagggccaccgcagcacacagattgagacgctacttggctatgccgatagcgactgtgtggcaatgcgagagaacatctcgttccaccccgaggaccacaaacataccgtaacaccgtcactaacaccggccttggaggaatggaagtccccggaggcataatgttggcccatccggtacatgcatatcatgaacagaagcgagaatcttcttgcattcaaaggcattgatggtcgatattcccagtcaaacctgatcgtttcaatataaaagttactcgggatatataggccgacaatttgaaagcccccaaagcatgaaatgacctccaaaacagcatgaatgaaagcacttgaaaattgaatgtttatacgtcaattcaagtgccatgtaaagatatgagaaaacaaaaatgtcaagatgcctgaaagcctatcaatcattccaacggtccaaccacttctgcattctcttgtccaatgtgggcgcaggagcgggcgcagcctgaacacaaacggaggattagctttcaaacccaatcgacaacaagcaagaatcaaactcaccgtgttctcgatggtgttcgccgtccatgtcgcaaaagctgtatccgtgtactggatggttggcgcacctaagtagctggttgcaatagagaacgggaaaggcgggtattgaggagtggctgatctggtggcgacagtagtcccagcgctcttaggcatcggggcatatttgatcgagccagtctgttcaccgtatgggacggtatgctggtcaactacagaaacatcgccaacgccgccgacagcagccacttgtcgtttgcgcaattcattgtgctcggcttcgcccttggcggttgaggttgggaactgcaaggtggcttcggttgaggaactcttggcgagactagaggagttgcaaattgaagtgagatctgcggcctcgatgaggtggtcatcgtctttgactgtaggccaggaaataacgacggcgggaatcggctgcatcgtcttgatcgcatttgttactttggtcgagaatgtacctttcatgttggtcaaagtgaaatgagaggtgaacccggaccagtagttatgagggcctgataggactatcttgagaaagctgattgggccccagggacattggtcagtcacaaagcgaattgatgaagccgccgatgtcagaggcaaatgaattgtcttactatgcattgggttcattcccaccgacactttgatcgacacgaaatgacaccatgtcaccaggagcataggcgccattgttgataacttgcgatagagtgtcctagatgtgtggttagctctatgttttgcagttccgtatagagagaaacatacatatgaacctgttgtctcatcaccggcacagagataaaaattataagttgaagttggttcgccatctaagccccaaagcagactcacgacagctgcaccgtcgaaactcagatcatatgttgtgatctgagaactgatctggccatagacggccgtgaataacagggcgacctgaagtaattggactctcatggctgatatgattgagaagcacaagtctcgaaagaacagagagttgtctcccagtcaagagagagggaaatcaccccttcatagggtggtctggtatgtgcatcattcctaaggcccttgagccctcgagggtttgttttctatagacccgtgatgtgcactaagataagtggatgggtccgtgctatcgggcttctcctgtcaaggtgtcagcccacaacttttgacaacttccaaacttataaccgacaggatgtcgtctcaagcaaattggaactcggtgactggcatagctacactattgttcgatggcaaccttgtcgccattgctatcgctgtcctattcacctttggtgtcccgatcgcactgcatatcttcttcttccagaccgtagcttctccgccctcgagtaatttcctactcctaggccccagtggagctggtaaaactgcttttacgaccttggtaggttgcagtctatgacctgagagtggctaagttctcgctaaccaatctatagctcgaggccaagtcctcgcttgcttcaaacaagtcacacagcacccacacctcccaagaatcaaccttagtaaccgtgaccttaccaccgactgtcccaactggatccaaccgctaccgatcagtgaacgatccctccttgaaggaggccgtccggaatccaatcaagtaccgcataagggatacccctggccatggcaagctccgcgtatcgcaaggaatctccgagctccagaccatgtcccggtcaaaggatatcaagacaaggctacgcggtgtggtgttcatggtcgataccgctgctctagttgacgaagtaacgctccgtgataccgcaacctatcttcacgacgttctcctctttctccagaagcgcgcaaagaacggatcatctagcaagcgaaccactgatgtccctgtcttagtcgccgcgaacaagcaggatctattcactgcattgccgccgggcgcagtgagggaaaagctggaagcggagattgatcgcatccgcacgtcgaagactaagggtcttctggatgcaagtgcggatactgggttggaagatgaagaggaagaaattttgggtaatgatgaacaggagactttcagcttcaagcttctggagcacgaggtcggtgtcaaggttgacgtggttggtggtgctgtcaagggtgactcacaagaagagttcggatctggagtgcgccgctgggaggagtgggttggtatgtgcttgtgagcgagatgactttttgctttcttgtcttgatggtccggaatagtaaatatgtggtcctatcatagtttacttgtatatgttatgccagaaaagaaaagttgcactgagaagattctagactacaatgtgctttttccattgatattgctaatctaatcctagtgtctcggtagcttgggcatcaatccaatcctgtatggtcaatgatataatataacggcgtgaagtaaacatagcactcacccacaaatctcgagcaagtttcatatttccagatatcgcgctgggctcacactgcgtggcgataggcataaaataccgaccgcgatgattttgctcctgcacctctcgactagtcgcaagatataagcccgtggcagcaccatcctccagactttgacccagccacgatcctgccgttcttataagccaacccaggaatctcccaaaataaaactcgcacccgagctattgatcagtgacgatattgcccggaaagaacgaattgacatagatctgctggctcgctagatcttgatcctcctgaagtcgccgactgagctctttggcaaagaggatattacccaactttgatcggccataccgccatactccatcgtacaaggcgggccacttgacgcgtgacgatgagaatagaagatccagatcgagcttctggcaccaacaatggaacgatgagctggtcacgacaattcgtacgtcgttgctaggcgtcacgctgttcttcaacagtggtaggagtaatgtggctaggacttggtgtccggcgcagtttgtcgcgaatacacgctcgatattctaagatgaacgcttgttatcattttgaacactgatggcttcatttaagggaggtaggtcaatatgtaatgattcagtcgagatggagagatagagagagaagtcacctgcattgcaaatcagtatatgaatccgatctgtgacttgttttatcttctcaatcgcggccttgacatcctgaatatcgcccagatcacatttgacaaatcattctccagggagaggcctttgcggtgcctccattccccacgagcagtgatatatctgtcttcacttctggcaacgatgattactttctctatctcgtgcaagagaagctgagttgtgatctctgtattctcgttattataccctacaggatattcaactggctagaggtcaaggaatctgcttaccttttccaatgcccgcttggccaccctggggaacttggttgctgggctgagatataacgagaggactcactgtcactacagccacccgtccatttaacggcgttatgtcttccagggagaagttccgataagtaaatattactgtcatctttggggggtggaatcgacaaagtcgagaggatccccagatgaagtcgcacatacatctctgatctgaaccgacgtcatcgccacctaaaccgaacagacttgaaaaagaaccatgtgtatattctctatggcgtgcattaagtattgatcacattaaacgccagtctctgcgctgcacggtctaggtatttcaatcccacaatgtgttgaatcccattggggagccttcatgccaacgcaacagaaacgcctgttcccagatatcaatgttcaggaatgttgaacccctacccaacaagcaatgtctcatgcgaatgcatttcagaaaataaacaaaggaaacattttaggccttgtccgtcttggactggtgcagcatccaagtgagcaggtcgaccttggtaacgatggccaatggcttcatcgcaccactttcgtccttctcggtcacaactgcagcgctattccactcgaagaagcggttcaggacgctgagaggggtatccatggtgatctcgatgaagccacgactccgggtctgaggcttgaaggagtctagggccttggagaaatcacggggatcggtgactacctcggaaatttttgagaagtcaaacatgacctcagagacggggctctggcctgaggcccggccgtgcgtcagtcggctgagaacgttgcccagcgtgaccagaccgacgagcttacgtccggagggggcaaggactggaagctgatcaaagcctcggtcgcgcatgacctcgatggcagtctcgcaaggggagttggctgtcacggtggtgatgggcttcaagcgcaaggagctgaccttggcattggccagagggtcagacacaggcacatgagtttgagttgtcgatgcaacggcgggaagcgacgggagtagatcgttggcggcgagccagtcgtcatcggcgaacttgaatcggttagcttgaatggaagatcaatcaggaaaaaaattgttccgaccttggagaggtaacttctgatgctgtcgggaagaatcacaacgatgacatcgtccttggagaactttttggcctcgttagccttgaccagagccgcaattgcactaccactgctaccgccgaccagcagaccctcctcggcgatcagacgccgggagtacttgaaagactccttatcttcagtcttgatccaatgggtaacggcattttggtccagaacctcggggatgaaatcgtatccaataccctcaaccttgtaaggttcattggcacgagcttcgttgagggagggaggcagagcgagaatagaaccatatggatcggcggcgatcacgtcaatatcggggttgtgcttccgcaggccacgagcaagaccggtgattgtaccaccggttccagcaccagcgacaatagcattgattttaccattggtctgggtccagatttcctcggcagtgccaagctcgtgtgccaaggggttgttcgggttctcgtactgatccaagatgtgggcgttgggcaattccttctcgaggcgtctagcgacgccgatatgcgattcgggcgagtcaaaggcggcttcgttgggggttcggatgatagtcgcattcaaggcacgcaggacagcgactttctcggcggacatcttctctgggagagtgatgatggtcttgtagcctgagtagagaaagaatggacacaattaagacggatctgacaagtaaagcttatacaataaatacatacccttgacggcagcaaccagtgccagaccaataccactaatgaatctcaattagcgtccgcgcccatgaccgctcgaagcgaaagagaaggaaggaaaagacctacgtgttgccactggtgggttcaatgagagtatcaccaggcttgatgcgaccagttcgctcagcctcttcaatcatacgtagggcaattcgatccttaacactgccgccggcattgaagtactccaacttggcgtagacagtagcatcgattcccagggtgcggggcagatggttcagccgtacaaggggtgtgttgccgatctgctgggtgatagtgtccaaagtgaccggcggggcgccgggggtagtggtagaagccatgatgtatgagttgtgatagagagaatgtagcaaagaagaagttcacaagtcgaagatttcgccatcgacttttgtgccccgcccgatggtagccggctttctctatgtgggcccatatatctatggactttgtttacttttgatattgagtgttataaggtcataggttataggtttataggttggtgtgtgttatatataggtattagctgatgggttgatctatttaccaatagctcatataatgaatgtcaatggtatacattaaaaagtccagaggattatttctataaaacccctaagcctaacatgaaaaggatcagactataattcagactacatactagatatgtattaacattataacgttagatcaagagtgcagttgaggcgagaatttctattgaaaaaaacatatatactgtactccgtaattgaaaaagacgttgagaagaccaaacacatgacgaggccgaatttgtcagtctactcctcgacttcgggagttcaccagctttctctctttgacaacctccaaaacagagatccactggtctcactaactctcgctaaaaacctattacttctgctaactcctgcttggccaaccttaagagctagggcgatctctacccaccaccaatggttgattggctaataatcacctaaagggtcatgttgatagatcaagctcgacaagctcctacagcacgcatatcattgcccgattccataccaactgtccatacttgactagatcattcgcgcttaaatacgacgcttttacaaagccaaggccgtggctgtgcagaaaaatggccattccccacacactcaaatgacaattcatcccctgagagacaaaaggactgaatgcgaatattatacagaacgccaataatctggacaagagagcgagtatgtccaggaagccgagtatattatggtagtacaactgagttcgtcgtcaattcattttatctactcttcttctctagtcaaatcgcgacacgggatacggcgatcttcacgggaaaggcatcatggaacacatcgtggctgcgccaagacctcctggctatccatattgaaagactcgagggctgattggctctgtcaagtgccagcgcatccgactgttgtttttatttgcctcctttatactccgaactccatattgtattgcggcccaggcgctgtatagtctttgcagtccccagcccatcttgcatttttgttttcttctttttgtctatttcagcgtggtttcttctagaatttaccgagtttggtccatctcttatttgattttgtctcacggtctgatattttgcgtgtgcttcatccaattccccccgagctctccgatctctccaatctatacggagttgttgttggttaaaaatgggctcaatcaggtcgacacattcacaaaacgccgatccccgtctccgtgggaacagtgaacagccgaagacggtccaggagaagggctcccagaactcgatattgcccaccaactctaccacttccaagcgagcatgggccttatttcgcgtggacacagctggagagagtggtcgaagcggcattcaaccatggcatctcctcaaggtatgctttaggagtgtctgtacgctctcgatggtcgtgaatatcctctggccatttgtccccgccgcaattgtcattcatttcgcgcgacccgatcttcacgtctggatcttcagtctcaattatatcgccatggtgccctcggcaaacctgctcggctttgctggcggggagctagctaaaaagttaccaaagatgataggcatcattgtggaaacaactttgggcgctgtggtggaactcgtgctatttatggttttgttgtataaccatggccggaccgaaaactcggatctgattcctgtcatccaggccgctattcttggttcaatcatggcaaatctcctgctttgcttgggcatgtgtttctttgtcggcggtatcaagcgtcatgagcagaccttccacgaagccattagtgaagtcggtactgggttgctccttgtcgccggtttcggtctgttgattccgagtgcgttctactccacgttgcgtggaagcgtcaatgcacagtttactctggtgcagttgaacgaatatgccttgacgattagccgtgccactgcggtgatccttctcgtagcgtttttgacgtgagtggcctaggctcttgcctataatttaaccactaaactctgggatagatatctttttttcaacctacacagtcacaactccattttcgatgatatcctagagaaagacgaacaccgcgacgaagaccgacacgaagaagccgcgagggcaaagcttacaatgatagaatgcttccttgtcatcgccgttgcactgacctgcgtctgcatgtccgctgtcttcctagtccaagaaatcgagtacatcgtggagcgcggcgtctcagataatttcctcggtttaattcttgtccctctggtggaaaaggccgctgagcatcttacagccatcgatgaagcctgggacaaccagatcaactttgcactcttccactgcctggctccttcgatccaaacagcactgctgaacgcaccgcttactgtcattgttggttggggtatgggcaagaatatgagcttgaacttcgagatcttcatggttgtccttctcgtgctttcgattctggtcgttgggaatttcttgcgtgatggcaagtccaattaccttgaaggtgctctttgtgtgctggtttacttcatcgtcgctgtttgcacttggtactatcccccggtgcacataacctcgaccaaccagtcttgaatgtcgggtagtttctaagcgtttttggtccgcggatattttgcatactgtatatcactcgtggttggtgtttttgaagagtttgatagagggggggggggactaaagctccattagatggtcagagtaaataatgtctgaacatcagacagcacctaactagtcagataaggccacataatgttatatgacctcatatgagacaaaaacagtatgatctgaccggtcattattccagggttgtctgaggacgcaaggcttcgttcatcaacatctgcgcatcaacacgcagctcaaagtcggccaggaaacaaaagctgatctcgagtttcgacaattcctgcgcactgactccaccgaccttcgcaacccggctatgcggatagctcaagtcctctagagcctttgaagcaaccgaaacaccagcaagcacaagcctgtgcatattcttgggcaggacccttaatacattatcgaccagcgtcatcttggatatatatacgctagctgcgagatagaccgcagtagacataggacagtacctatgcaaacgaagcagatactcgttcaacggaatcggtggcaccttctttgacaggaacttcttcgccaagatagccatctgaatcgcttcttccgtcgccttggcggggtcgacaggatcatctgaatccttaacatgcaatccgacgattttcaccttgagctcatcctcaacaggggtatcagaaactagagtcgcggaaccatgcgtatgcagctcatcggggctgatgggtttctgagcaaagtaagcgcctagccgctcaacattcaaacaaagcaagtgtaatgcagcctcgggcgaaatatcaaacacggcggcgggggtctgtgacgaatcaggatcgtcggcaggttggtgacggtcaatattatccaacggcgagccgagttttagcatggttggcgcggggtttgcgttttgcttggaatctgtgtcttgggacacggacatggttgtggtttgcgttacggcggtggccatggtgtgcgcgtatggattgctgtcactgccacgcgcaggcgcgggcttgatagggggttgcgagtagcgcgcacctggaccttgaggtggatggtagctctctggctgggtatctcattttccaatgagtggtttctggcctctgtagggacttgggttcacttcctggcgaatcccagaatcgatcacgggggagtcgggagagttgatgtgatatgatcgatgatgttccctttttgtagagttgtatagcggggtgagagtggtaagttgtttggatctctatgcggaatgagaagttgaccaccaatttccaatctaaatgttcagctcaccttgaaacctgatacatatatctgtgaataaaaaccgaatcaagtatcgagttaaattgaattgagttgaattaaaatcaaaacaaatgaacttaagtcgagaaataaggagaacaaggcaaaaggggaggataagaaagtcgccacatgtgaccttcaccttggaatccatggactatacaaaacaaaggtacaacttgagaatcatcacatttcccaaccaggagaataaaacgaaaacaaaccccctatctatatatttaactagactccatacaaaaaaaaaaggctcagcaactcccgatacctgtctcttctttttttccagcagactatgagcctcctactcccgacacaagacgcgatcacatatcctagcagactcttgagtcttatgccgggattagggggtaaaaaataaacaaggtcaaatccggattaaacccatacttctgtttgaaaatggaaggaaagacagcctcagcaagggaagcagtttatccacgaatatctgcgaatgtctcgacatgctgggtcacaaatgcgagacataacgcggccagggcaaccgaatgctcggttttagaacaagacgcatggcgctcgtctgcgttgtccaaggacacgtcgacccgaacccgacatttcctgcaatccacgcttaacgggacccggttcgtctgtttcgtaccggctactagcagggtttgagtcccaggtattctgggaccgtgggccccacaagggaccctgtgccggagacctgtattcatattcgtggcctcgtgaggaactccgtgaagacgatctcggttcatactcgtaaccagagtcatcgaaccgaacgtttttttgtgttctgttgtaccgacgctgccgcgtcgacagccgcacatttgaatcatatctccttctagcaaaattagaggccatttcatagtccgggggatcaaccacaaagagcctgggataagctggcggtgcataccgagaactgaagttgccaacaggctctgatctgtaagttggataggaaggccggtacttcatatctatcgagtgtaggtatgtgcgctgccgtgttaactatcttgaattagcttcttgttctcgatactcggtggaacccaatgatataactcgagggcagtggagtgctaataaatgattcatgaacaatgcatctggagacaaagacatccttgagcaagggagttgttgaaggaacatggcagagaaatgaatggagatcgacgaacctcgttgattacagcagcacgcgcgaattgccgggcacagtatgcgtaagaggacatgtgaacaatggcaaagcagattcctttcaaagagtaaagatagagaagtattgatatatttggatcgagacaaagaagactggacaaagcaagatcgtttgatatggattaaaaacaaagatctttatggcgagatattgtgttgattttatattaaagcattttgacaatgaacagggatttgaaggcaacatctgctcgaagagaggggacctataatgaagttattaaatgttgatattttctgtctccaaataaagaatgactgatacaaacctgaggtcaccagggcgcaggtcaacgagtcagcggctttgaaggccagttgcccggtgacaagattcgttgaaattcgacaaattccctccaacctcttccatcacaccagaaatgtggattttgggagtttcatctccgaaaagaggtcctatatcaagaagtgatatagtgtgattagcagggtgttccaaagtgaggcccaacttgaggagcggcaagatacaacggaacgcctgttattgtccatatcataaccaacaccgactattcggggaatagtgtccaatgccttgtacaatggctggcattactgcctagaatattcactgcgcaacattatccaggggttttaaagtcacggggaagggatccttcagccacacgccaccaagcgtcaaatcagaggtcaaatcactttggcgctaaaagaacccaacggcgattaagagccaaccattgacaccttcgacaatgagatcagacaatatttcatgcatgaacgctcagatccataaaaacaatggaaccgtgaagaaaaaaaaaggaacttggcttgggcagtaaagcttcgccacgattcctatgtccacctctcaattaatcgagcttgattgctatcacggtggtggagaacatccaaattgagcttttgagccccattttgaagactcgcgagttctttctcgaggcttgagagcgctgactcctccgaaggatcgcgcagtgatgtttcatagtgagagttggcgtgcaatgagtaacgaagaagctgggatgcattatccaacggtgccaaataagtcagcagaggagcgtccaccgctatattaagaccgtgcagtgtttcggaaatgtgataacgcttctcgtggaggtcaccaacccctccattctcgcgcggatggaggattgattccggtggtacaccaacacgcctcagaagtctttcgagtgacggttgggcaactacaggcgcagtgggcgtgcggggggcaagaaggaagcctggctgtaacgatcggcgtcgcagagactctcgtcgggatgatggctgtgtgacgagttcgctgcctgcttcggattgatataacgcggctagctgttctaatagttccgaggacgactcccggactccgagttggtttgtaagatcttgcttcgacaaagtcatttcgatcaacatgtcgagtgcctagaagtatgaattagttcattgctggtcactgacactgccgaggtagagcctcatacccgttctagtttctcctgcgacaccactcgcagctgatcatgctcgttctggagttcacggaggataggctcatggaactgctgcctggtcgacatttctgccaagatttcgatctccggatacagagactctatttcttcctcgagggcagtgttcgttgcctcatacgttgcgtcggaatttgaaccgcctccgtgaattgtttccagatataatcgatctagacggtagtgtatttcctccgccacgtagcctgagagcatcgcactgagatgatttgtgcgcttgaccgtagatgcatcgtttccacgatacttgatattagacatgagcgtttccagattcgcgagcgccttgtcgtcctgctttaaccgggtagacagagaagcgagtattctcttgctttccgcgcccgacttatccgttgcggtcctgaattcagcctccaactcaccgacaagctcgattgcctacgtagagtcaggatcagcaacacgcgacggttggttgtgacgggcatgcccctaccgccatggtagtattttgtctccccgcttcatgtttcttttgcagccgagtgatatctcggctccgctgcagctccacattgttttccagacctaattgcttgttgagacttgcacattggagcttcaaagcttcggtctgcttttgaattgttgccgttgaggcttcaagggactcgatggcgttgcggagttcgtcttcgaggataggccgtgttgcgccgagatctgggttgctgataataggctgaagagcgccggagtttacaagcttaatatatctgtttccagttagttccgtcttctgactgatggtgcaaataagacgtacaacgcgagctcatcttttgatagcagggtgtctggacggagatgcttggccgcccattgcgcgttcctgtcatcctcaaatgacgactcaatcacctcccgcttggctgggatatctcgatccttgaaaattgatatgagtttgtcggtcaaagtgtcttccattgttggcttgaggagttgtgatgcgaagacctgataaacaaggagctctgagagtggagctccgatttctcttggagtcctttgttgagaccaacactctcctaggtatatctccacaatactcttactgatgcataatttatctttattatgaataacttttctagtaggagctatagaattatattctgtatgaattcagaagtctttagtcgaatcctttaggatataagccgattaaagagataaaatgatggatatagtttgaaggaacctctgttcctttgggactattatatatatctctctctttcagcccttgtttgtccttggataaaagacatttcatttcagcaggcaacaaatcttgaacgctcgagtataaaataggttcatcccacagggttctgaatgtatcgccatcgactcgagctatccaactaaatatttctaaattgaccccttaacactaaaatcagtaagcatctcttgtactaaccaccatcatggatgcaacaactctgcaggccgcgcgagaatttttcgccgactcgcgagatgatttcgtcgtatatatccaggaactttctgccggagatatctcagatcagggcgccgctgcaatccaaaccgagcttcgtcgtatagcccacacactctctggatggatggagcttcgagatgatcccaacggaatgagttgcagctatttttcagagcggtgctgcaacctctcagatattgttgtagaagtcgctgagatggtcactatcaaggacggacagctccctcccacagttatgaagatgttcggtatgctggctatacacttaggacgacttaatctgaacggccatcgcgaagaggacaagtatgcgcggggctttgatcgcatggccaaggatgaagatcgtagatggcagattggatcccagggaccggatgatggtagagctgaacttcttttgggcttgtggactcgtatgaatcggatttcagagcctggtcccaattgtacgttcgagtgcctgcgtgcacatgcgggttctcacattttataggtcgatgagtataacgacgagggtataaagatcggcagagcaacggagaaaagaggccgagactcaaaatgcggctgcctgtggctgagtaatcaggcaaaaaagggagcaatcaaacgtggatgtcaagaacaagacaggaatatattagaactgtttcaatttcatcgagtacagcgtacaaaatactacggagtaggcacagtataagtgtacctgcgacgtgtctctcaattagcgtctccgcaaattcgagtccgcctttttgaccctcaccaatctgtttaccattaccattcattcaccactcaccacttaccgttacctttgaccatctctacaacttccgagctgcgcttcttgaaaacttccccactcagtggatgcgccggcgacggaaccgcgatgttcctttagactaccgccgtctcaaaacaatccagtcctcgaatcgagtccctttccagcccccgggtggcattcgatacatattcaacagtagacaacccgaaaatgtctgccaagccctctttagaatcccttggccccagccatggccagacctccggttccactttcgcctcgaatggcaacgggacagctattcctccaaacgacgtggagatgaagagcttgcgccctgatccccctaagggctcaattcctctgggggaggatatcatgcagttggctcggatgggggaagttggcactatgcagaaactgttcacagccaaaaagttcaccgcaaactaccgtgatgaggaaggaattacaccgctgcatgtttgttacaatctagcgcaacaaacaatagggatctgtttactgaccgcattctctctttctagtgggcggcaatcaacaatcaatatgcgatgtgtaaattcctgatcgactccggagccgacgtcaacgccaaaggaggagagtcggtggcaacaccagccatgtgggccgcccaacggtgtcattattatattgtgaacttattgctccagaatggaggggatcctctcctgacggacgtccaaggatataacatcctacacctcgcgaccatcgacggcaacgcgttcctagtcgtgctgcttttacaccaggagatccccgtggacgttgttgaccaacaagggcatactggactgatgtgggctgcatataaggggtatcctgcatgtgtagacttgttcctgcgatggggcgcaaacgcaaacgccgtggacgaaggtggcttgacgccgctccattgggcgctggttaagggctcgatgccttgtgtcctgaagttgctcgaatacggcaccgaccgctttgcaaagacccgcgatggaaaatcacctgcgactgtggcgcaggaaatgaacaccctgcgggtttggtaccactcgctcaacgagcgcggctttgaacccgatggcacccaaaaagtggtgccactgggcctttccagcttcgtacgcagcaagagcatcatggccaagttcttcttcctttggccttttttgatgatcctgattaccatttggatgctcagtagcctggcgattttcatcgctgtgcccctcgtgttagttactgtcttcgggatgcagtatgttgcacagcaatttgcgaacaaggggcccatggaataccgcgttcttcaaaaaacaccgtatctagctggtgtctttgctggcacattgttctgggttggcttccgctatgtcttcaaggtgctgccggcaacatactcatcgtcgccgattctgaacatcttgttcgcagtcttcttctgcttgactgcttatttctacgtttttgccatggtcgaggacccgggctatgttccgaaagtgagcagcaggaatcagcagagagaggttgttaaggaactgttcgaccagtggaagttcgacgaagagaatttttgcattccctgtatgacaagaaagccactccggagcaggcactgtcggcgttgtgggcgctgcgttgcgaaacacgatcagtatgtgtctcgataagtttctattgatctgactactaatgcttgaatagccattgcccgtggattgacaactgtgttggatcgaacaatctccgccattttgttctttatatagtctccctcgaagttggtatcattctgtttgtgcagctgactattgcctgtgagtactagtggcgaaagaaaatattggctaggatcagtcatctaacatgatgcagatatcaattccctacctgctcccgtcaatgccacttgcaatgtcatcaacgacacattgtgtgattacgccactcgcgaccccttcaccctgattcttaatgtatggatcaccctccagctggtctgggttacgatgctttgtgccgtccagctcgtccagatctctcgcaaccagacaacctacgaaaacatgcgaggccaccacatcgaccggtcctacccaagcacccaagcctttgcgtcggccatgaccgctggaaccacatcaatggaggccgctggtctttcggcttctggacaaggaccaaacccggctctccgcggttctcccgcacaccgacggaaaaacggctgcatccagcaatggtcatcccttctcggagtcgacgctttttggacaactgcgaaggatggtctccgcgatggaccccaggcaactagaccccgcaaccccttctcccgcggtgtcgtcaccaattgtcgtgacttttggtgtgacccggctccgctcttcggcaagcgccagactggggtggcgatgctcggcggcgaggtgatcaactatcatgatatgtacgaaaccccgatgcgcatgcgcaccggcaaccggtccggcgaggggcctggctaccgcagcgttgctggcgaggaccccgaacgcatggtataagccgatccgagatcttagcgtatttgcatttgttttcgattccagatcctgcattgatatccctctactttgtgttttattatgcaaatcagcgcggtgttgcgttattgggccacgtggcacgagcaaatgtttgcattttgcatttagaaaagatcttgtacaattgacgtcagatattaatgatttgtttcactatactattatgggggatgacttggctcttgagcagcaagacttgactttgactatggggtatacatatatgacacccacttagcatccaaggtcctcaacctccaacccccgcagtttcacatttcgcatcagataagatagatcgtctcggccgtgcagtgaccctgcaggctgcagctaatcaccaacacactgcataagggccgaattccggaccttccctgtgcggttctggaaagatacctagctaggaagggtagtcatattcccgtccgaagggaccgattggttcgtccaactgagtctaggtctaggtctaggtccaggtccaggtctgtacatatgtatatgtattgaaaggattatgctttacattacgcattacgcattacgtgagtataaaagtacctgcatggaagctctagaggtgcatatgccagcgcacactaatcaccaagcaaggaaccttggcagggctgcagcctttcagggacaagcaatgtttgacggccgagggtccagtgtggcctgatcttctcggtgatgcacttgctaataatgtagcggtcaacaaccgcaattggtttcttggcttattacacaaggtactcttactgtgctagggctgtcacctccccaaacttccctagacgcttccggaacaggcaatatatacaatgttattatacggtatagggtccattcaacggctttcaagtatggagcccgaaacaagtccgaatcatagtacgatctgaaacctacctcggtatggagatatggagacgaacgacaggagcagggagagacgtcaaatagtagctgtttcctgtacacatccgatatcgccgaagaaacagccgaaagatctaatctctcgggtaccggcccagtcctatggagacacgagccatgtgcatgggtctttggtagaatacagtcactatgaaaattagacaaatcaggtacatgtatgtcggctagtttcttcaggggacaaggtacgatccacctgtaactatcttttttttttatatattgcacgtcgtacgatgcacatggagagggcttccgaatcaagggaatagacagaataagacagaattataaaattaaaaaataccataacaagtgcgtatgcaggctccatttcgctaagactcgactaggcaggtgatggagcttgaggaagccacttttacttactccatagtgcggaattgcgagctctcatgaattctacatatgttgcccacatgaagagaaggtacggtcaagcctaatctaattaaaaaggagaaaaatgagaagaagaaacctagccatataaaagatcatataaatccaaaaaagaaaagaataagaaaaaagaatacccgccaagtcctcgatcagataaaaattttcaagttatctgatccatgcaggacccacttggatttatctgattcgacgtgatttattcagcttcggagactggggattcgtgttgacccaggaaataaaacaaaacgccagctaaatcgacatgaacctacacaacatcgtgcacaagctatgcatcctattagcaccatctaggattgggatcggcacgagtttcgcgcgacttcctgcatttcgtccaattgtcccgcattcgccaaggaaccattttcttctcaaaagttgtttgtgaccgtaacacttccgatcgggcaactccactttataggtccgcacacatgtttcggtactggttactttacagggatgattctaattgcctgaagatctgggccgatcggttcgtactgtgggtagactcggaaatgtgaagaaaattagaaaacaagctcatcattaacgcaaagaatagaaataagaaaaaaagaatctaaatacacaggatgtctaaatgttttcacccagaatagcgaagggaacttagaacagcgaagggagggggaatcatcgagctgtctcgccggacaaattttaaaatctcggcccacttcccaaaagcaaacccgagacacgtaacgacgatcatgtcacattttgtttcacggctctacagcatagcacgtacccgggtgtcctgcaccacgggagcaccagccaactgatccgcaaagacggagccaacaatctcgccactccgcacagccagcaccgacagcaaagaatcactcagaccgtgggtctgctcgttgcagccctgcagccagataccagcctgggcactgaccttggcactgtcgagtgaaacacggtaatcgcggccggggttccaggccgacgcgccggcgggccgcaagctgcgcacgttctcgaggagttcctcgtgcgcgtcgcggatgtagcccgtcgcaaccatcagcgcatcgacatccaacacctccttgccctcattctcgttcttgaccgacttgacgtggatgcgcatgcggttcgatgcgttgtggtgctcgatccgggcgaccttggtctccgcgaggatacgctgctgccactgtgtctcgtctggattctccacccgttgcaggtacatgtcgttgtagatggactcgatcagctccaagcgaaccacgctgtagttggtggctttttcgatcgcgatgcgcttcttgcgctcttcggcgctcatctcgtagaacttgtctacacgctcggggttgaagatctcgttcacgctggaaaaaagcaaaaaaagcaaaggttagctgggttgtggtactttggggctgtgtatttgggaggaaaacatacaaaggagagtcatcactgggacgcagagcgctatcacgcaggatgagggtggtgcgcgagttgggatagcggcggtgcaaatcgtggtagatctcagcggcactttgaccactgccgacgacggcaatgttgtaaggggccatatcgtcagtcagcatctggggcaggtgagtgcagtacttggaggagtgcatgatgcggggatcctgggggaaaccaggaggcatcttagccttgccaccaagggcaatgacgaccttgcgggagttgcgggaggagatctcgccagtaccggtgttgcgcgagacgacggtaaagaagtcaacaataccacgggcattggtgggaccggggacgacctcgacgacctcctcaccgtagttgacgacgttgtcaaagtgcagggcacaccagcgcatgtagtcctcaaactctacacgggccggcaggaacgtgcctagattggtgaagtggatgagacgcttcttgtggtggaggtagttgaggaaagtgaaggagctgcggggatcgcgcatagtagccagatccttcatgaaggagatctgcatacgcgagcccggaaccagcatacccgagtgccaggcaaactgattctgcttctccaggaagcagaccttgggcttgaagttggggtccttcaaggcaccgagggtagggtccatagcgtcgttcagggcaatggcgacagcgagcgacgccgggccgaatcccacacagagcagatcgtgcatctccccggcgccagttggtcgcaacagcgaccgagctgcctggggctgggtacgtggcaccatatcgaggaaggagagctccttgcgggtgacaggctccatgacgattcaagggtttttagagtaaaaggtaaagataaaaaaaggttaataagtatgtgtatgtatagaccaccggaaagggaaatcccagagcttcaaggatgagcttccaaggtttttgtttttggttcagagcaaagaaaaagaaacgggaaggaaaaaggctttatatggttcggagacgaatgtagcggatcagataacttgaccaagtggatccgcctgaaggttctctgaagccgctgaagcctctgaagcccttcgcctcggggtttttattatttttctctgccaagttttcgtatttccctggttcggggtgtttttttcaattttatcaattttatcaatcagtaaatttcccgttggtctccaccgaggcagagacggcgatgttttatttccattcgggtgtatttttcttgtatgtcttataacccggggctcagatgtatattatacttctagtaccttggattagagactccactccatatgcaggaagatagaagaagaagaagaaaaggttcgatgcttcatgcacgcctaactcggtcaaccagagcgcagccatttataattcctcgaaaaacccaaaaaaggtcttacggccgatgtcgggaataattggacatcggaggcatgtccggaaagcgttattgtacgtattcgcatgtgtatataacatgtgtatgcacgttgttcttcctcttggcaacgcttgggactcgtttgcagtgggggcacatcctggaaaactcctccgggctatagccagtggttagggctttttgctttttattattatttgtttgacgcttgggcagtgggaagtggaggtgacaatgatattatatgaggctattattgctactgccattgtatcatccgtattgatatgtttctatttactgtacctaatacgtcattcataaccggacactttcacagatccacagctgtttcagcggttgaatcagccgagtggtgggggaacgtggtctgatgattatgcgtacatttgaaatttcgaagagagaaggtgctggatgagagagtaatagagtcatacagaagagaagaatagaactaggagacttagtagaatcataggctaatattcttttccgcgcttggctcggtgatcataaccccccccccccccatctcatgtattctcccgtatggatgtgcccctcgatttgctctttttaaaaaaaataaaaacggacgagccccttgcgaaaaattcctgtatgtgggacacttttttttggcgcgcttgcctgcataagatcttctccagccactcacgttgcacctaattagatcgactaagcaactctactacctacttaggtatataccttaccttgaatatatgtatgaatgagaggagagggagagcgagagaaaaaaccaccacccaggccatggaccgattcactcaattccctgccgtcaatgacgatggtgatgatgttcatattgtaccctggcaggtggatgcccaactcccctcggagatacttgctttgtcatgggcagtcttgctacgtgcattcacaacggatgagaatcccgtctttctattgaatggtgcgccagtcaaggcagatctgtctgcccaaacggttcagccagcacatctggctgccgtatcagatctctcagtcaaacacactgccatagtgctgggagatcctccgtccgatgatgatggacatctcccggtgttgcagtggaccctggaccccacgactcagctgggaactttgcgtgcggctggaggcatggatgctactttcctgtaccagttgggcaaccagctgaaggtgatcgtgcaagagcaggctgttctaaagggtataccggtgacagtgtctgccaccgaggttcctgatctagccatttcaaatgcctccccctccacattaccagggccccggcttctacacgagcttgccctgcgtgagctcaacaattcaaaccatgccattgaattcctcaaggcggatggaaacgttcagtgcctgtcgtaccatgacttggaccggctttcctcggagctggcgagtaaaatagctcgtgcttcgacgacctctccgggcctacagaaggttgtgccagtacttttgccccagtctgtggaattgtacatttcatggctggctatcctcaaggctggcgcagctttctgccccttgaacaccgatgcaccaacagatcgcatcgagtttatcctgcaagatgtggccgcatcggtggtggtcacaaatgatgctcttgtaacaaggataccgctgaaagagcatatttctattctcacagtggacgatcttcaaaccaacgccgatatcacagagccatgcgcagaaaacagcacttccactgatctggcgtatgtcatgtacacatctggctctacgggccgccctaaaggcgtcggggtgtcccatcttgctgccacccaatcactccttgctcatgatgatttgataccccctttcaagcgctttttacaatttgcatctcccacctttgatgtttctgtgtttgaggtctttttcccgatgatgcgagggtcaaccctcatcgggtctgagagagagaatatgcttcttgatatttcccatgtgatgacgacgatgagagtcgatgccgctgagttgaccccaacggtggcaggagagttgctgcgcacgcgagccgccgctccgtctctccgagtgctcctcacaattggcgagatgcttaccagacacgtggtagacgagtttggccagtccgagggcaggggtggcattctccatggaatgtacgggcccaccgaagcagcaatccattgtaccgcggccacccatttccaggccaaggatcctgtcaatatgattggaaagcccttcaaaaccgtgtcggcatacatcatgccactcccttccgacgagccatcctccaaggagcttcgtcccctttcactaggccaaattggagagcttgtggtgggtggtcctcaattggcagacgggtatatcaaccgacccgaagaaaatgccaaggcttttatagacagtccggtgtatggccgactctatcgcacgggagacaaagcccgcatactccccactggagagattgagtgttttggccgaatttccagcggccaggtgaagctgcgaggccagcggatagagctaggcgagattgagcatgttatcaccagagcctccggtatccgcagtgctgtaaccatggttatcgacgggaacttagttgcatttgttttggttaccgacaagggaacgacggacaacagtctccgagatgtctgtcgtcggctgttgcctcgctttatgatccccggagaattcctgctcgtcgaccaattcccccaacttccctcgggcaagatcgatcgtaaaacactagaagccaatttcattcgccaccgaagcactgccctggcttttgatgatcaaccctgccgagacgaaaaagaagagtctatcgcctcaagcgtagccgatgtgctaggccgacgactcccgtcgacagagagcctggcagcagcaggtcttgattcgctagcagcaatccgtctcgcgtctcatctcttggatgcaggaattcggctaggtgtggcttccttgttggaggccgactcagtggacggaatctggcaacttgccaccagtcttgaagctatgagcccaaataatgatacgcaagcagccttgcaaaccattcttcagcttgttttagacgcaggtgcagcaagggtcgactcgctgggcttgagcgatcaggtttcggacgtcataccgtgtagccatatccaacaggctatgatcttggagactgttcgagataacaaggcatactgcaactggattgagctggaattcgagccctcggtcagttcaactgcggtaaagaatgcatttggtcaactggtggaccacaaccagatcttacggtccggatttgtggaaatcggcctcaaagatcactcatatggtcgattcacctggaatactgtcaatgaccatatttccctgaaacatgaacttgaatacgatttgggcctgagtgcgggtcacgatgtcttgaacccttttcgagtccagatcaaagaaggcaaggaccatctccgcgtgctggtgcatatccatcatgctctttatgatggatggtcttggcaaattatgttgaaagatctcagaagtatcttgtccggagaggagctcacttccaaaccgccatataacatcgtcgcaaactatttcattgagcacaaactggacaaatcggcaatagagtcctcagtgtactggcgtgaacaactccaaggtctttatcctgcaactttccctattttccacggacatacagatataatacatgctaccgacaaggctactcgcgtgctggacatatccgtatcaaaactcaaccaagtttcccagcatcttcgcgtgagccggcaaaccatttttcaagccgcgttttgctatattctctcttcctacattggaaccggtgatatcacatttggaactgtcttttcaggccgaactctgcccttgaagggcattgaaacggttctcgggccttgtatcagaactttgcctacgcgcatgaacctcgacaaaatgcaggacgtgaccgatcttcttttggccatccagaatatgaaccgcaagtcactcgagcatggcagtctttctcttcaggatatcaagaaggcttctggtatcggcttggatcgcagtctcttcgacacagcgctcgtgtggcaggaaagcatttggtcagatgatgaccagggctcggtgttccgggaagttggagcgggggagtttttagaatttgcgctgttgctggagtttgagccgcgagaagaaaacatctttgctcgggcgacatatcaagagtcggtgctaccagttgagcaagctatgatactactcgagcagattgattctgtggcctcggtcttgattgacaagattaagcttccaatccaggagattcgatcgtatcttccctcgtcaacgctgtcaattgaacatgcaacattacgcgatcaagtcaatttgccaagcctggcatctagcgtcgagatgattgcttctacagacccggaccgggtagcggttgagttgatgctctggaagtcagagaattctacttcgttgatggaaagcatgacctatagtcaactaaactcccgagccaatggctttgcacacttcttgctccatatcggagtgacaaatgacgatctaatagccattcatctgacaacgtctcttgacttttatgttgctgtgcttggagtcgccaaggccggtgctggtctcctcctccttccccaggcttcttcgcagaaaatccattctattctctccacggcgaaatccaagttctgtatcatcgaccacttgacggaaagagatcatagcttggattctctgaagtccgtccagctgattcatctcttttattcactggatgtttaccatgagtttaatattccatataccagtaaagggtctgacgttgcctatgctgaagtgtcgctaattgaagatgacttgattgaaaacatcctcatctcacggcaaaacctgcagagcaatatcaatgctctgtcagactcgtatccagcgccaaccggatcgaaaatgctatcatgtcttcagggatcaggtggtaagttttccatgacattttaattttcagattatctttctgacaagaatacagcatctatttgccaggcattctttgcttggcatgctggcatgacattgtgctcagctacagaattgataatgatgactcgtatcgagcaagcctgtcaagacatgaacataacacacctgcacttgcctcccatgctggcctcccgtattgatccacaagccgtccccagtgtgcaatatctcctctcttctggtgaagaaatgacccttaagctccatcacaattgggccggcaaaggtctgaatcaagcatacagcaaccatgcactgactcacgcatgtactctctgtcttaatatgcaggcatcgacccatgttcgaaacattggtagacccctgaagaacacatctgccatgattgtagcagatggagattcgctcagccttcttccacgcggtgccattggagagctatgcttcggcggggatcaaattgggcgctgtctacctgactccaagtcgccagttactgggcgattcgttgatcatcctgagtttggtctgatctatagaacgggtgactctggaaggctgcttcctgacggtacactcattctttcccgaagctctggccttgctcagtcgtatgctccgtctattgatctagacggagttgatcgtgctctgatgtctttagaaatggcaaaagaaacagtgagcatgattttggatgagccgacactgcgattggcagtgttctgggttccttcaaagaaatgctcaggttccgtgcaaatcgagaaggctacgaatgatcttttcaaggagctcaccaagaaactttcttcttctgaccttccatcccttcttgttctcgttgacacgatagatctcactaggtcttataagattgattacttcaagctgaggcaacggttggggcaactgataacgaaggagcttgcgatattttcaccaaagcctaataccgatactagtgacagtttcactgatcttgagaagactatctctgccgcgctatcggcagtcactggcaccgaccaaacaaacgtccgcaaacacacatctttctacagactgggtctggactctctttctgccatttccttctcgcgaaagctgcaggagtctggatgtggaaggcttgccgtgtccacaatcctgcgccatagctctatttctcaacttgcagctgtcattactgccacgaccaacggggatcagcccgaaaatgcggtgcccgcaccaccaacagtgttcgatgaaatcttcactcatcaaatagaagatgagttcaaagctacagccataaatgttcaaagcatttacccttgcactccactccaggaggctatgcttgcagctgaatctggtgatcattcggcttatttcaatcacctcttgcttcttgtgcataccaatgccgagaccatgagagcagcatgggctaagatgatgcaaagacaaggcattcttagaacttgtttcacgcaaactaatgataggcggttcgcatatgctcaggttgtactggacacatcggtcttaccgtggtcccatattgaaacttcctcttctgagcttgagaatgtcatcaaggaaaacaagtccaagttcgagggtatttctcctgtcaacggccagttgccttactcattgactttgataaccgattcaactgcgcagcagacatatcttctactgtccatccatcatgcactgtatgacggagaaggtatcgcccagttattgcaagagctccagctgttgatttcaagtcaaaagttgccaaagaacactccattccgcaacttcatcgattacatgacctctgttgattatggctcgtcggatgaatactgggaccagtacctgtccggtgtttcaccgaccctccttcccacacccgggcccgcagccaatgcaaatgagtcggcatcacagcagatccatacatccctcaatggctctttcgtatcattcaggcaaaactgcaaagacctctccgtgacccctttgaacatcttccatgccgcatgggccagactcctctctctatacaccggttcatccgacgtctgctttggcaatgtcttcagctgccgaaccgttcccttggatggcgcagatcggatagtcgggccttgtttcaacacactcccaattcgaatcaagtcttcttcaactgcaacaaatagtgacatcatgaaattgtcccaaaagagcaataacgacattttgcctcaccaactcagccctctccggcgtattcaacgacgtattcttggcgatggctctcgccttttcgagacgctcgtcattttccagaacagaaatacagatctcgattccaatatctgggaacttcttcaggacgaaggaaacatgggattccccttgatatgtgagatcatccgcgacgagtctaaagacaaaatacagatctgcctccacttccaagtatcgtatatctcacaagccgtggctgagaaaattgcgcgggactttatagtccttgttggacacatcattcaatatccgtctgctcaggcatccgataagcggctattaggggcagacattcctcgagtatttgaacataacgtgtctaagacgtcaaaatctgttcagttccccacaaaatctcgccaaaagctcccatggtcctatcgagaggagattgttcgcgaccttctttgcaaattttcggatgtcgactcggataatgtgttccaggacacaacgatcttccaacttggcctggatagtatcaacgctgttcaggtatcggcgaagttgcgtgagttagggtataagatctcatctggtgatattctcgaggtatgtcatattcctgggggtgaattctattctctacctactgacttgtatcaggctgcttctattgatcaaatcgcttcccttcttacttccaacgcgaagattgttgaggaaatcgagttcgactttggacttttccaaaccaattatttgcagtctgtttgccagcaacttgagatttcttcgcaaatagtgcagtctctgcgcccttgtacgccagtccaaaacggaatgctggcaatttttacacattcacacggtgaagtgtacttcaatagaatgaccttaaggtcctcagtacctttagataagaaggtcttgaaagaagcatggtctaaggtcatggctcagcatgagatgcttcgaacaggatttgttgaattgcgcgatcagaataatccttttgctatgataacttaccatgaatacggcaaattaccatggtacgagacctcgtcttccatggaagtcacttctggtgttcaacaaaggcacgctttggaaaatctccaccagcctccatggagcattgaagtcgaagtaggtgaccacaccagtatcatgcatttctctgcattgcatgctatttatgatgctcagtctctggccaccatattttcagacgtcagagcagcatatgaaggaaaggctctggctatgccggccccagtcaccaaaactctcggccctatccttcttgagagtaagagccagagcgaatcagcgcaatccttctggaagggacttgccccagaagtgcagccctccaaattccccgacttaaatcccatccgcacaaacgagcgaacattactcaccacctccatccgttgcatacagtctcgcaaggcttttgaagatgcctgtcgagatatcggcgtgacactacaagcagcggggcaagccacgtgggctcgcttgctctctgcgtacacgggcgagtccaacgtcacttttggaaccgtgctttcaggtagaaacttgtccgctgatgctcagcatgcggtattcccgtgtttggtcacagtgccgacgcccctgcatattgagggttccaaccgacagcttttggactgtacgttgaagcgaaatgctttattggtaaagaatcagttcgcgcctctgtcgcatatccagcgttggctaggtagcgatgagccactcttcgacacgctgtttgtctatcagaagtttaattctgatgccgttggtgctgataagtgggacatcattggcgaggagacgaatattgatgtgagtaacaagcagacaggatactccacaaatttacaggatctaggctaacattatatagtatcctgtctctatcgaattgattccgcactggaacgatcttcagatttcgttgagctaccggggcgatcttgtacccatggaacaagcaaagatcctcttgaatcagtatgaaagattattgcaagatactgtcttctgtccagatgtcaattccaccgattacgactctgtgggtagtagtctgctatcaattactcctgccaaagaagcaccaattcctaccacggtttctttgctacatcaattcgtcgagacgaacgcgatcaatattcccgagaagattgcgtttgaatttgctttcggtgacattgcagaaaatctgcagaagaagacatggacttaccgtgagttcaatgaatgtggcaatcaaattgcgcatttcctgcaggccaagggggctattcctggtggaattgtgggaatatgcttcgacaagtgccctgaagcctccatggcgattctgggtattatgaaagctggatgtgcatatctggctattgaccctggtgctcctatctctcgtaagcagttcatgttagaggactcggctaccaagatcctcctttgcaatcaatcgaagatggcggaactagatggtcttccagctattgatgtccaggcacttgatgagcctgggcttcttgaccgggtttcaacaggggatatctcactttcccgtcctatccagccagatgatacttgttattgtctgtacacatccggtacaactggaacaccgaagggctgcgagatcacgcacgataatgccgtgcaagcaatgctggcattccaacgattgttcgcaggacactgggatgaagagtctcggtggttgcaatttgcctccttccattttgacgtcagtgttttggaacagtactggagctggagtgttggaatttgcgtcacttcctgtccacgcgatttgctgtttgaggacctgactggaacgatacaaaagcttcgaattacgcatattgacctgacgcccagtttggcaagactagtccatcccgatgaagttccgtcgctttgtcggggagtcttcatcaccggcggagaggccctgaaacaagaaatcctagatgtctggggcaagcatggtgtcatctacaatggatacggtcctactgaagttactatcggatgcaccatgctcccacggatgtctgccaatgacaaagcctcaaacatcgggcctcaattcgataatgtggggtcatatgtcttcagccccggtacgacgacaccagtcctacgcggcagcataggcgaactctgcgtctcgggacctctcgttggaaagggctatctgaatcgagtggagctcaccaaggaaagattccaagagcttcccgaatctggcgatcgcatctatcgcactggcgatcttgtgagaattttgcacgatggaagcttccagttcctcggtcgcattgatgaccaggtcaagctccgcggacagcgacttgagattggagaaatcaacgaggtcatcaaacaagctacgcctgaattgaacgaagtcgctaccctggtcatcacgcaccccaaacaatcgaaggatcaacttgtctcctttttcacgactgtcactgcagataagaaatctcgtgctgtcgacgttggagtccgatattcagaagaggaccgcgccctgctatcgaagatcaagggtgcttgccgcactcatcttcctgggtacatggtgcctacacatatcatcccgatgacccaatttccgctgtctgccaataacaaggctgatatgaaagtcttgaagagtatctatcaggagctttcgctagaaaacattcagaaattgagctcgatgagcgttagccagtctactgacagtgtccaggaacagaagatcatatctgtcctggcgaggtttattggttcctctgaggagaagatctcatcatggtccagtatctacgagcttggtctggattctatatctgttattgctttctcgagaagtctccgggaggctgggttttctcaggctcagccatcgaccatcatgaagtgtaagtctggcagtctaggtgttggttaagaattacttgactaacgatacatagaccctacaatttccggcatgacgtcggctctacaggtgcctatctcatcttctgtgtccgtggaaaccctccaacgcaatgccaagcaaggcatcgaggctttcgctcacaaaaactcccacgctatcatcgagcatattggagcccgctacggtgacattgaaaagattgcgccctgcaccccgcttcaggagggtatcatataccactacctggctagtagcacgccgttgtactgctcatctttcactttcgagctcgacccttcagtgaacctcgagaatttgcgcgcggcttgggatcaggcccagagagacgttcagatgttgcgcgccagatttctgccatctccagacggctatgcccaagttgtcatgaagaaagacgcccttccttggttccttgctacggccggtaccaatcaagagattgatgacttgcgcaaagaacgacatgaccactggattgcccagctcgacggtctttcatccaatctatgggaagtcggagtcatctcttcccccaagatatcggtaatgtgtttgaacatcttccatgctctctatgatggaaatagcctagtcctgctcctcgaattggttgcccgaagttatctcggtcagatcgagagttcggagttaatcccggaattccttgatgtgttgcacttgggtcccctttgtaaaaaccctgctgcagaggcgttctggaaagttcatcttgctggctgtcgtgatcgagctttcgccgaggacggccaagtagacagcgcgccaattctgcttaaagctcaaatgaatgcgacagatcaagttgaccatcttcgccggtctctcaatgttacagagcaagctgtccttcatgcctgttggcttcttactctccagcaacaatactccttcgtgccaccacttggtatcattgcctcaggcaggacaatcgatgtaccaggcattggcgacgttattggaccgctgttcaatacgatccccagcaatgtccagctgcatggcttggagtcttggtctgatgtcgctcggcgctgccatgactaccaggtgtccatgattcctttccaatacaccgccttgcgggacatcgtgaaatggctcggaaagaaccccgacgagcggctcttcagctccttgtttgtcttccagagggaagatgataacgacgaatcgttcacaaaagatctttggtgtacacttgactcggaggcccagcatgaataccctctggcctttgagattgtacgcaatagcaagcaattttttacagccactattgccgcaaagagtcatgcggtatcgtcggaagatgctcagcagatgttatctaagtttgagcaaattctttttgagtttgcgcaagaccccaaaagagagttgcccaagataaatggggtgtctctcgcacaagttgtggcggatggtgaagtgaagggacaccacgagtctccaagaaccccagaacataccaatggtgaacataccaatttcgaacatattaatggctctttgtttgaatggacttcccaggcttgcataattcgcgacgtgattgaaacccttgcgggggtggagccgcaatccatcaacgagaacacatcaatctttgaagttggacttgatagcatcgatgccatcaaaatctcctcgcggttgagcaaagccggcatcaaacttcctgtgagttccatcatgcgccatcgtacagtcaaggcaatgagcgagcaactctcaatgacaaatggtcataccaaggatgggacattatcatcacttaatcggctagagaaattgttgaccgagttcctcggggctgaaggtcttctccccccgagcgcgattcgagtcttaccagccacacccatccaagaagctatggtcgctgaaatgtgtgcctctgggtacaagcattattacaaccacgagatcctcgagcttgagccagatgtagacattgaaaagatggagcgggcatggagagctgtcgttagagctcaccctatcctccgtacttcatttgttgaagtctgggatccgaagattcctgtttcatacgcccaaatagttcacaacgaggatcaaattgacctcaagactatccatctacacggcgtctccgtggaatccgttataaagactcagcgctcaagggtccacaataagccggcaggctgtcccttgctctctatcaccattgcagtggaaggggataggcggtaccttgttttgtcaatttcgcatgctctctatgatggttggtcaatcaatctgctccacgaagacgttgccaaatcgtatgctggtgtagagtgttctcgcccgccagccgatgaaattctcgggcaaatcattgcctcgtctggcgacgaagccctcagattctggcgagcaacgctatccaaattcaccccggtgtcattctctcctatggaacatgcggagaatagctcggttgtcgttcaccgagcagaacaatcattatccgttccaatgtccaaggcggagatgttctgcaaacgtcatggcattaccctccaggcgcttcttgtcggctgctggtctcttgtccttgctaggcatgtcaagaagctagatgtggtatttgggcttgtcctttccggtcggaatgtggctaactctgagcacgtgatgttcccgactatgaacactgtcgccatgcgagttattcttcatgggacgcgggtagaattggtgaaatatgtgcaggaggctctcctcgccatgtcggagcatcagcatttcccgcttcggcgcgccagaccagatacgggatcgcgggcattgttcgatacgcttttcatgtatcagaagagaccggtcgaaattgtccagaatgagcctaggcaagtcttatataaatctactggcggagcagccgaagttgaataccctgtttgcgctgaagttgaaggtgtcggggaggatctagttggacgagttgcttgtcgtggaaatgttactgggtatcaagatactcttgtgctgttggagcagatgagcgatatcctttcgtctatcatcgatggtccatctgaacagactgtggattttaccagtgagggagtgaagatttgtggaagcgccgctttccaggatgagtctgaacaaaatatcgagcctgaagcagtgcccgggacactcgatcaggcggaatggtcgccgattgagtcaaagatccgcaaaattctttctattgcatccggggtacctgatgattccattgacaagagctccaccatcttcgagcttggcctggacagtatcagcgccatcaaggtggctgcactcctgaagaaacagtccgtcaagcttgcggtcagtgacatgcttcgggctggtactgttgaaaacatggccaaagcagccaacagcggcctaacggaggtctcgctcacaaatatatcaagcattctccacgattcactcgatggcatcgatgtggcgggactgctacagtcacatggtattgatttgcaactagtacgaaaggtgttccccacaactgcagggcaaacctatttcctctcaatgcacattctgaatccagagatattctatcctgagttttactatctgacatcacgacaattgagccctgaagtactcgatcgggcctgggctcgggtcatagaccaaaccccaatgcttcggacggtattcgttcccacttccgactctccgctattaccctatatgcagatcgagtttgaggttgtgcacattccggtgatctggcattccaagtttgatcggcatcttgtttcaagaagccctaagcaagaatttggggtagtgccggtcgcactgcatgcctgtcaaacgaaccagggaacggcgcttattctgcaaatccaccatgcattgtacgacgctgtcagtttaccccatatactgaacagacttgttacgcactgcggccaagaggatgttgtcaaaccaaaccccgaccttgatctcgcacagctcgtggcattccaatatgttcattcgcccgtggatgtccggcggcaattctggcaaaagtatctaggccaaatctcaacggcggtaaaacgagggcattgcttcggctctgtgcaacatcactaccgaccgggcctggtttcaaatatggccagtgtcgaaaaggttgccaagcgccggggccttagcattcagaccgtctttttagccgtctatgcacgagtgcatttgcagcaattcggtgcagctgaaaccacaaatggcgcagggtctcgcaggcggtcaactgttggactgtaccttgccaatcgatctcattccattgagggtttagccgaatctgttattcccaccgttaacattgttccactacgactggatgacaaactcagcgattccaacgacaccctccttgacgccgcccgcagaattcagactgaaatcaacgagatcagccgacccgaatattcgggcgtttctctcctggaaattgccgaatggacgggcatccgaatcgacacctgcgtcaatttcctgcgactccctgagcaagaattgaaagtacccggcaactgtgaccacgcaaagttttcttttacagcaattcaacgcgaggagtttgaagatcttagcggggcagccccggtttcgaaaaatgacccaattccgattaatggcaatggtgtagcgccacctggtgcagccgagacgatcccaggcctcgagcatccaagcgcctcaacggcggctactcaagacatcttccaggtaagtgggggaatgcacatcactttatcctaacgggtaattgagccttatacaattgcttacatttcaacagtctacgatcgacgtggaagccgccatccgtaatggtcggttagactttgggcttttcgcaccagaatctcgtcttgaccgagatacagcggaaactgtgatcggcgctatgcaacgggagatgtcggcattggtgacaggcttcgaatcgatatagaatatctagtgatgctagggatggaagagaggaggggtggaagagtatcccggagcgattccacggcgtatgaagtagagtagaccaagatcgttttttttttcttttttcatgtggatactcttctttttcgttacctttttttttgtgctatttgctcttgctgtctggctcatcatactcgttgcatatgaggcgttgaatgtgtatatgttgcttttcccaatcgaattatcgaactttgatttgacgagtgacggcgggacccacggacgggacgggcccggggatctttttatcttttcgaactgcaggagataacatagatgtttgggtgtagtacatagttagtatagtctcgtatagggtgttataggtacaacatggaccgggttttctttttttggtatacatatatatccctctcgttgacattggaccaagtactagcctttttttcacattcccccaagaataggactgatgaatcagatatggaatataagaggcagtgcgatgcataggtttaagcaagggggatttcgcgtggcctatcgccgacttgaagttgttcttctctttctttttctttttctttaggttagagcaccgactgaaaataacaatatgtatactagcactccgtactccgtaccctgattgaaaataagaaaaagaagagaagcggcatatacccctccctttgtttattgtggcgtcagtgcaggggccgtgcgaatgaaaatcgaagacgcgcagtgttccccaaggacggagtacagcgtacatatgggcttaaatttggatttgggttatcttagagctgagtttgctggcattttcattgggatattattatttttcatgggttataagaagttcttgtctcgatgccatggttttatatagggctatttattgtttattgcttacctaatatttgttgtcacaatcacgcgtcaccctaatccaaatcgggcatccaacgatcaacaacgcgactgcgcgttaatcggtttggtctttatttctataacacacccgaacaccctgaacactttagaatacaaacgtctggatagttgattttcgcaacattctttggtatccccaagtggtttgttaaagcccaactctcgattcccgatcgttggacacaatcacataccaatacccaacccctcctcgattcactttcgcgccctcgtgggctgacctcaccttttgaattgggggaattaccccttgcgaccttcttttttgttggaagaaaaggttccgacacacccttgacactacttttacaagagtgtacttgcaagtgaaacattccacacgccttgatctggttatcctcgggtatcaaaaggcatcaaggtgaaacatcgcaggcacgcaggcacgcagacacacgcgttcgtgcttgtccctaggagagaagtcgaattcctttcaaggttggaatccgatatggaagtggtgtgactcagtcttgaattcgccactcgcatttgatcagtttggaaaacattccattccgcgtgccttccttcggatatcatattcttcgaatatcgaaggtatccttggctcctcgtcttcctatctttcccttttctggacgcgttgttgatttgaacgcgtcaaacccttgggaccttgggaagcttctctaaatctctccatcttgagttttcaaatctcgaatctctgggtatctacatttccttttaagatatccagagcgcatttagtttgcgacgcgctcttcattctggactcattgtgcggcacgtggacacattcccccgatcatggttgcaaccttttcgccgcaccgggactccggtggcacacttcatctgccatcgcactcgggaatccatcacgttgacgcgagctctgctatccgccaactgaggcgctctctttcgcgctcaccatccaagagttcgaacttcttcctcaacccgcgtgctcattccccctccaaatccacctacatctcttctcccttgtcaccctcacggcgcgcttcgcataacaatttcgtcctcttcccatctcatcaatctcaccagtcgcctctcgccgtcccttaccctcctagcgcgaagattactaggccagcaatgcgtcgacgcacatcaccccgcagtccacccaagcgcgttttgagtgtttcaagtgacagtggtaacgcgactccaactcaactcgtcgctttaccctctggcgaagaaaatgatttgactctcgatgacctcgtcgcgccaggtcaaagtacgaccccagacagcccttgttttattaacactactcctgcccctcagggtgaatcgacttttgcaccgcgctcaagcttgtcgcgcgttgaaaagcgacgtagtgggaactttggcagctttgcgacgggcagtcccttgaagcgcagtgacgggatcatgaatttggaccaagcgtcgcgaggcagcccttctgcaaaacgacgcagcgtgcacacttccaatttctccgccgaatttagcattttcgacaacgaagtcgagaacaccaccccagagggatctccgacgcgcaacgaaattccctctttccccacgcctgtccagccccacagtccattcgcgaccattcctaagcgctcatcttctctacgacggtcgactctgcagcagcgcggcgatcgacctctctttggacggccaagggctttggatgattcgaccgacgcatcaccacctgagacgccattgtcggttaggacgcgaacgtcatttgatagcagcctattccagccaggcagcgagaacattttctcgcctaagccgccagccagccctcttttctccaactccttcgccaaccctcccgtcaaccccactgtcaacgctactcaaccccctcgacccactgctcacccactctctcgtaccatcactcagtcctcctctgggtcgagtatcgaggactcgcccacacatcaacctgtccacaagcccgaaggccggcgaacaatgttcaacttctccaaatctctccccgcgggggctactcgtccagcccccgtaactcggctcacaggagaagacacagaaacctttgcgaccccagataacttcaggctagtgaagcctctacccgcggcattcatgtccactggtcttatttccaagaaaaaccgcaatgcagaggaaaatctcgcattcaacaagagcatgcccgatacaccatgcaaacggcctgtcaaccttttcaccgctgggacaaaccccccggaccgattattcgacaagtcacgtctggttcatcaatcagacgccgtttccgtctctccatttaacccacctactacctcgcgtcccaagccaagtcccttcgctcggggcatgggaatattcggcagcagcttcaataggcctgagacctcgcggcgtgggagtttcgctagcattgatggcgatgaattgattcttgcccaatcgccctcttcccgacacgacagccagcctccaaatgatgacttccctcccacaccgaccaaacagcctttcctcccctctcgcacctaccctcccgccacttctcaaatccaatctctagagcgactatccgagacagcgagtccgctgcacgagaagcttatgcaggcatcacctcacactccccgcgaccagtacttccctcccgacccgagtgggttatcgatatccgtgcccagtgaccatcagtatgtgcaggagcatgatcttcctgccactccaaccggaccgcgagactcctggtcatcattcagaaggcccagtctccaaattagcggctaccatgttccagatgtcgaccccactttgacatcccgctttgacagcgtggagcttattggaactggcgagttctctcaggtattccgtgtcgcgcagcctcatgacgcgtccttcccatctgtcttctctcttccatcaagtgaaccaaggtcgccaacttctctcccccatcaggtgtgggctgtcaagaagagcaagcagccctatctagggctaaaggatcgcgagcgccgtattcgcgaagtcgaagttctcaaggccttgaccaactgtgaccatgttatttcctttatgggcagctgggagaacaatggccatctgtacattcaaacagagttctgcgaagagggtagcctggatggcttcttggcacaagccggtctcaaggcccgactcgatgactttcgtatctggaagattttgctcgagatgtctctgggactgaagcagatacatgacaagggattcatccatcttgacctcaaacctgctaacattctggtcacctttgagggtactttaaagattggtgactttggcatggcgacacgctggcctgcagaggatggtattgaaggcgaaggagaccgcgaatacattggaccggagattcttatgggccgatttgacaaacccgctgatattttctcacttggtctcatcatttttgagatcgccggcaatgtggaactccctgacaatggggtatcttggcagaagctccgcaacggcgatatgagcgatgtgcccagccttacctggagctcggagaccagcatcttccgcgatgcatctggaaatcctatctcggaagggtcatctttcgaggacctttgtacatccgatctgggtgacaacgaattcggcgatgatttcctgacaagtcgtcaattgagcaaccccaaaccacaacgactcgcacgaagcggggagttgattgatccacccagcttcatggttgatgccagccacccacaggcattggacggaattgttcgatggatgatatcccctgagcctcagaaccgtcccacggctgaccaaatcctggaaacttatggagtgcaatttattaatcaacgacgccgcgctggcgccaccgtcttcgagggtaactggggccccgctgacgagatcttggccgaagatgccgaaatgatcgacgtgtaatttaatatcccttttactcttgtgcatacggagggcgttcctgcttgtttctctgcccttcttttttttcttttgtcacctcttcccggtgttcgacctgggccattttccttttcctttttttttttgtcccatctttgatgccatgttttcacgtcacgacatcattcccccatccatcctatgcttcaatggttgaggctggggttttctattgcgggctggggcgttattgatccatcaggtttggatctgggcgttaccttgagcagttcacggataccacaactggagtttgcgaagggtttataaccctgtttcacggatcttttttttttcttttgtacgattcgatacctagcgttacgagatgccagaaatgtaccaacctcacaggatgcttgcttctggaaatggtcaaggtcactctggcattctgctgtattcgttccaacatatctcttatcgtcttgtccttgggagtcaatcgctccgaggcgacaattctttccagggctgatatctggtcggatggcatgcttagttggcttggaaacgtcactgctatctttgctcttttcttttgccttttctaatgatcaatgtgtgccctctgggcagtgatgaccccctatccattttctttgagcgtgatcttctctgctagtttggtgtctttggttgaacacctgggttccatgtctgtgtagtagtaactgcaatgacgaactgaaatgatatcctacgagcatcttgcttcaattgtatagtttattcccaatcaaagtataactaccgttagttatctatacctatggttagtcgtattacaagacaataacttcattgtctcgtagactggcgttcaagccttaatatccgatattcaggcaagccgacattaaaaccaatgaggatatgtgatgtgaataccttctggcaagaatgcctctcaatggatgtcgcttcagctcgatacaatcaatcagttgcctaaagaaattcggggaacaatacactatatccttttttaaggccattacacgctggttacttcatagctcgctgtattttatcctacccactatatttaattccataagattacgtgggagtacgggggtcttatattcaagacaaaactatgatttatcttcatcttttgtctgtacagcgcacgttgtatactcccaagcccaaaatatatttcggattgccacgggatttcttggcatttggcgcaaacttctccaacttcttgttccaaaccatctttaacctcgaaacttggcaccctgctctgcaagtctccctttccctggtattgagcttgacttattggatctctacactttgtgcaacatgcgccgctgtctccaagaccccgactcacaataaccgcaccttacctccacctcaagaagctccgccctgcacatcaacttctttttagttttctctctcccataataacagcccatatcacgcaccatggacaataaagatttcgtgtcggaaaatcttttccgcctaacgggcgcgtcagagcccaccgtaatcgactttgtactcgcgaccgccagctcagccaagtcgacctcctccctccaagataccctgacgtccttcctggatggcatagatgccagcgaaattggtgcctttgctcgagagctccatgcccgcatggggaagggcgcacagtccagcgcctctgcctccaaacccgcaacgagcaaggaatccacgaaaaagaagtaccgtctggtagacatgggcgaagaccaaccagaacccgccccatcgctaggaccgaccaacgtcgaggcagaccgagagcgacggaaaagacgggacagagacagcgacaaggataggagcagcagcaagcgagactccgagcctcggagtcgcggggagaaggacgacagccgaaagcgagaccgaagccgcgatgcagagagccgcgaccggccacggatgaggaagctccgcaagaagggctctcaggacttcgacgatcgatggggcgacgaagagatcctcgaacagattgtcgaaaacgagatttacccgaaggaattcgaagagtcccccccaaagcgcacacgactcgatgatggctctgcgtctcccaatcccgcgtcactggccgacgatatcgatatcgaccctgagaccaagcaagagatcgaccgccaacgagatctccgtgaacgagacgagtttgccaaacgactagctaataaggaaagtagcaagtcgaagaagattgttgaggatcggacgcgcgacggcgaggctgcacggcgacgtgcgctgggcgatgatgccagcgcacgggcttcgatgatgcccgatctgcgagaacgatctcgacaggaatacttgaagaagcgcgaggcagaacggttagcactactgcgacgacaggttatagaggaggccgcggagttgcgtgaaaaccccaatctgtctcgcaaggagaaggaggagttcgcgcgcaatcgagaggtccttcgtctcgccgaggaacggcttcggatcgacgatcaccgtgatggctatcagatgccatccgactatattacggaaaaggggaaaatcgatcggaagaaaaaggaagaggctctgtacaagcggtacgtcgagcgtgatgagctgggccaggagcgattcgtcacagagcacgaggagtgggagctggagcaggcggccaaggccaaggcacagatcaaaaaggccgagttcgtcgatgagggagactatgagtacgtcttcgatgattcgcagcagatcaactttgttatggacgccaaactcgagggcacgcaaaagccaatgacgcaggagcagctgcggttcaaggagcaggtcgatgcagcagagaagaaagccctctcgatggaggaaacccgcaaaagtttgcccatctatcaattccgtgatcagatcatccaggctgtggcagagcatcaagttttaattatcgtcggtgaaactggttccggaaagaccacacagatcccacaatacctccatgaagccggctacaccaaggatggcctcaagattggttgcacgcagccgcgacgagtggctgccatgagtgttgctgctcgtgtggcggatgaaatgggtacgaagatcggaaatgaagttggttatgccatccgatttgaggacaataccagcgacaagaccattcttaagtatatgaccgatggaatgttgctacgagaactgttaacagagccggacctgagccagtacgcagccttgatgattgacgaggcgcacgaacgaacggtgcccaccgatatcgcttgtggtctgctcaaggatattgcgaaagctcgacctgatctgaagctgctaatttcttcggcgacgatggatgcccagaagttccagaagtatttcgacgatgcgcccattttcaatattcctggtcgccgataccctgtcgacgtgcactacacttcacaacctgaagccaactacctcgccgcagccattacaacggtcttccagatccatgtcacgcaaggccctggagatattttggtcttcttgactggacaagaggaaatcgaggccgccgagcaaagcttacaggaaacggctcgaaaacttgggagtaagattccggagatgattattgctcctatctacgccaacctgccatctgaactgcagactaagattttcgagccgactccgcctaatgcgcgaaaagtggtgcttgccactaatatcgctgaaactagtttgaccatcgatggtattgtctacgtgattgatcccggatttgtcaaggagaacgtgttcaatccacgcagtggaatggaaagcttggtcgtgacgccgtgttcgcgtgcctcggccaaccagcgagccggacgtgctgggcgtgtcggcccgggcaagtgtttccgcctgtataccaagtgggcgtactataacgaactggaagagaacactaccccggagatccaacgtaccaacttgaacggtgtgattctgatgttgaagtcgctgggaatcgaccaactactcgactttgactttatggaccctccgccggcggagaccatcatccgcgctctagagcaactgtatgcgctcggggcactcaacgaccgaggcgagctgaccaaggtcggccggcagatggccgagttcccaacggacccgatgctcgccaaggcgatccttgccgccgacaaatacggatgcgtagaagaagtgctgtcgatcgtgtcgatgctcggcgaaggcagcgcactcttcttccgacccaaggataagaagatccatgcggacagtgcgcgcaatcgcttcaccatcaaagaaggcggtgaccatttgacgctactgaacgtctggaaccaatgggtcgactcggactttagcataatctgggcgaaagagaacttcctgcagcagcgcagtctgacgcgggcgcgcgatgtgcgcgatcagcttgccaaactgtgcgaccgtgtcgaggtggctgtcagtacctgtgggtctacgaatatccagccaatccagaaggccatcacggctgggttcttccccaatgcggcgcgactccagcgtggcggtgacagttaccgcactatcaagaatggacagtcggtatacttgcatccgtctagtacacttatggagattaaccctcgctgggtcatctacttcgagttagtgcttaccagcaaggagtacatgcgcagtaatatgccgctgcagccagagtggctggtagaggttgcgccgcattactataagaagaaggatttggagagtctagggttggatcgcaaggtaacgaaggggcagggggcggctggagagaagagtcgagagtagaacggataatgtagttgaatagcctcatataaaatagacacctcaggcactcatcttccaaccaatcaccgtccagataattcaaaccgcggcaaatcaaccgaacctcggtttctccgctttcccccagacttccaaggcctctccgaattttatacgtcacgtcagttactgatttcccctttttctctctcaacttctcaatctacatcctacctcaaaatgtctaaaacattcacccctgctgaagtggccaaccacaagactgccgataagggcctctacatcatcatcgacagcaatgttttcgatgtaaccaactttgtcgacgagcaccccggcggcgcaaagattcttaagcgtgtagcgggcaaggatgcctcgaagcagttctggaaagtatgtattctcttctttcttctttcttttcttcttgtttctctttaaaaccaaaatgttatatattgttatgatcggctatcgttcgagtcggctatcgttcgagtcggctattgaaagtatgtaactaacgccgtttagtatcacaacgaatccgtgctgaagaagtactcacccaagctaaaggtcggcgaagtcaaggatgctgcgaagctgtgaatattctattggaaaatgaaggaaatgatatacttcagtgttttggtttgggaggataagcccactgcgggaaaccccgatcagctgcacatcacataaatgtcacgatgttgtatttactccgctagcgaacgttatacccgtgattcctgtctgattattttgctctgtgaatatcaacttactacccggggcatgaatagaacagaatagaccaatataggaggttggaggttggtacatacagaaaggcttcattcttgctcataaccaagtcttatacattatgttcaaatataaacacgaagatcaatacctatatatctaggatctgctgggttgatagttggaatgtcaaaaaaataaacgcccttctccctcccgctgcacgagcaatagtatccgaatcaaagtggtatcaactcgaaaacgacaaatggtaaatgacaggtaatagatgtgtgaggtgagtaaagcagagaataaatatgaataggtgacggtgacaaaatagaagatatgtgcagtgaagatgtacgcagacaagccacggagagacatggcgatgaacctgcgccaaaaaggtgtgttgttgaaagaaagaaggagtaggtatatgataagtagtaagtaatgggcaaaaggtagagagagcgcatgtgaaactcatccactgtagaattagaatccccgccacggatcatcaggacggtatgagaactcgctgccatggaccgaaggcgtgtcaaactcataccgtctctcactccactgactggatgtcttgcggacatggcgctggcgcggaggcgcacgaggacgattaatctgttctgcgtggcggtcgatgaaagcctccatacgcacagtgcctatgtcaaacatgttgctgccagccccgctggaagcacggccactcgcctcggaagtgcgtcggctgatactgctacgacgacttccaatgcctggaggtggggctgggggctgcatggcggggaaatgtagctccgacgagccggccgtggtgccgctgtgtgaagaaggcatagtaccggcgctggagaagctgcggagagcgtggagagctgggggacggggcgcggtgttgctgcgtttgcggctgtgggttgagaaacggggaacgtggggtgcgtcggctgctaggtcgatgctgccccctgggatttcggggactggagccggagcaccggcactgttgaaggagcgtttgtcctttggcactgggcggggacggccctttgcgacccgaatggagtcgcgaattgggtttcggcggagggaggcttgaggtggggttggcgattcttcttgtgggactggaggtagagctgctaattcttggaggccgattgcggaatggctgaggaaggatagggctgttagccaaacgtagtggcgttcgatggttagtgctgtgaatttcagagcacgctgtggtgtcagcaccaggatagagcggttgaatgggatcgaagagccggcgcctttgggtatggggttgtcgtctttgacgtccaagacggattgaatcgtgactataccgaggcgagatactatgttagttgccactccaaccaaatcgaatgagttccttaaagacttacacttccggccacttttgccgagtaatgcaggcccactcgtaggctgtttactactccacataatggagccttcgtacggggcgagccaaacccatcgtttatgtcgcacaccactgttcgtgatattcgccgacacatcgtcagggttcttgccctcccaagtctctttggactcgcccatcccaaatgatttgcgtcgacggacgtatttgaacatccactcgccaaccatagtctgagcaatagcatcaacgacgctggttggctgcacaccaccggtggaatcctttctatcacactgttcatggttccaggtttgggatggagtcgtgcgatgcgagatgcgtttcgatggcccgtaccgctcacgaggtgctgtgatctcatcacacggcattggcggtggccgatatggtcggtatgcggggctttctggggaaaacgttgcggtcgatcgtgacggggaagaaagtgtttctggtctctcggtaatatccgactgtgacgttgctgctgcggatcgcactcggcggagagttgggcgccggacgacagattggcgaccacggtccgagaactgtctggtggctgagcgagtaggacttggaggcccgtcgctaccgttcagcggaaggttgcgtgagctgagacggatgggcacagggaatggcggtgcgatgcttgagcctgtactgccgctctcgaggcttggttcactgggactgcgggcacgaggtttctggtgcgcggcggttccgctggaaatcatggctaatttgcgcatgccgggctggcgaatactggtcataccagaccgctgggaagcccgagaacggccaatattgggtggtcttgactccggggaagatagctgctcgtcgatctcggggagaggcatgccgtccaaactaggtcttgatttcgaagtgatgagcttgccacgactgacagtgtatgcggcaaaagggcggttaaggagctcatcgtcggtgaagacatcgcgttcgccatgcgggccttcgtcatcgctgttattctcaaagccggcgaagagactgcttgaacgtagaggccgtcgaatattggacaaggtatcatctgagagcggaccattatcgttgttaccggggtacgcttgcacatgatctggaccaggtgctctaggaggcttcacgggatgatctgtcggctgatctgttatcagacgtctctgctttcgtttctcggaccgtggcggaaccgggggcacagtgcaaaactcgaggctaggctcttcgggttcagggggaggtagtgcatcttgaatagcagaaggaagaagactggcaggaagtctgacagggcgttgatcgaaacggatttcctcggtttggatggcgacggatcggcaatcagcaattgcccggaagttggcctggcaagcgatgttcttggtctgcggtggaagaacgacactatttcgaggtgaggatggctctgagcctggtgggtggatagcgatcatcggaatgtccatcttggatgaggcattgggggacaggttttcgctttgagcaacacatggttccggaacgacatcagtctgggtggatgccgatttcatttgcaccggctccggggtggactcgacaggctgaggcgagtcagccacattcggcgtccatggaggacttgggagttcatccacggtctgacaagaattagaaaccatctgaggtgcaactgggagcgtggcgctgtcattcgttctaggtattttcgttttctggtcgtcttctttctcgggctctgagacggtttccatgggctcaggaacaatgtcgtatacaaccttcccttctagcgtaggcgacggaggaggtgagtactggatgccgatatcgcggtattcaactgccgggtcaagtttcactgggctagcaagcccgagttcccgtgcacggagttccagggcagtgggtgagtataagtccgagctctgcagggaaagacctaggatcttcctggccttgaaagaaacactatgcgacccctgtgagtgaaccgacattgggcgttcttcgggcagcgcctccggagaggaaggcagctcatcatcagatgggacaaactcatcctcatcctcttcctcgaagtcgagttcctccgccaggttcaaacctgaaccattcttgcttccaggcgcgatactcataactgagtaccgcacgttatggaatatgaccgcctcttcaccttcttctgagctcaaggtggtcacgctcgtgcgtcggcggcctaggctactagatgccacactggctgagtcgctttctttattcttgtcatgaatatggtcactattctcactcggttgtgaacgcgagcggatagtcaccacttcctgggcggctgcgacctcgttcaaaacggtcttcaagcggccctctactacgtgaatcttgcgttccagggctcggcgttcatccgcccaggagtcttggtcgcgactccagagtaattgagttcgttcgacgtcctcctcccgacttcgggcttttttctgtgcctgctcgagccttttacgaacatcgccgatgttctcgaccgcttcatcgcgctcccgagctagctcggccatcgcagatgacgttccaccttccaatagttggatttgatgtttcaacgagcgcccttcccaggtcgcctgggacagattcgtggtcagtgtttcattttcagtccttgattcgtccaagctctcttctaacccatcgattgccttggttttgttctctatctcccgccgtagcgagagaatctccgatacgagagatgcatggagagtgggtgtgatcctccgcgggtcgaagggggatagggtatcctcggtgatatcgatatcatcttcgtctgtttgtccgtcgggggagaatgcgggggttgggaggccaggtggggaggaaggtgtcggggaggaatctcgccggcgcaaggacggtctcgatctcgatctcgatcctcctttggatggagctcgagatctggatctaaaggatggcgccggggaggggtgggccatggaaggcggccactgtaaatcggccatctctctttgtgaatgtgccggatgaaccgcctcaaaccatcgaggctctgctccttgggctaaccagagcacttcacgcactggatcccatcaaaagactaccgtagttcaaccatccgactattgactgctttgaagccggcgcttgtctctctccagagacaggttttcgctcggtgcaatcgactggtcgaacgcgggatggaggggaaattcaacgctgggacttttgacacttggtggaacgaagaggtcagccacggttacaatgaagatgtgtaagatgcacgcttgagcgcaatgccgatatttggatatgcacgggaagagaggccccctaactctacttacggagtactccagtgacaaacaggtctgaccgttttagcttaagagaggaggaagatgtcaatcgggaggtatggcccgattccgggagggaaaatagatcaacccgaaggatgcgagggccgatcgcgattatagaatcccctgagatccagtactctgtagatttacgccgtacggagtacttacgaaggtaatgacctgggaggagtcggggcttagaccattaaaagaccttaggggattagatcagccttgcggcatgcctgcgcatatcggaaacacggacgcgaggagagtcttggacttctaaaaaagaaagaaaaaagtcccaggggcgttcgttagggggcatatggggaaagaaaagaatccacccgattagcccacaggattgaatactccactgcagctgccagacactaagacagatgagcttcagtcaatatcccctgtataaaacgctttcagggtctgttcgcgcgagagagaatcaccagagtgtatggagtatacttggtattgtggtagatctcaaaggtcatggagaagctgtttatttggagacaaagaaacgaggaaaggtaaaaaaagagataaaaacggggccgtattctcaagagaatgagctattgatcagaaggtcggaaagcctggaaaaggaatatgagtgtactccgtacggagtaagattcatagattaactgcctggggtatgttgtaggagttcgtgacagaactccactgcgtgtctgggccatgaagctcaagcacttttttgacctgggaagatcaccccctattttgtttggcgaaatcatggaaggcaaaccataaaaataagaaaagcctttgcaatgaccaatagtttcgattccaaagacactaaaatagcaaaggttagcgtgtttgataaattaaatggctgtgttggcggccaattcgtagctcgtttgggcgacgatcgccgtacgcaatttcgcagagcctagtctggtttcagagtttccagggtgtatgtgtcgcatatgttgcacgtaacctgtcgcacgttgcatgttgtgtagtattggttcctttttgtgatgattatctctagacagtcaaatagtcaagaatcgaagcatctcggacattatcgcggatcaggggtaaaaaaacagacccatccaaggtctccaccgagagcttcgaagaacgaggaacccacattggccgaaatgaagaaccagacattcatccggacttcacaccacaatggatgtacgcgacactctatggcctccatggcctcggtctgtttctcttgcatatgtcgatgcaagtgccggtcgcacagctagcaaacgtcagaggtggcgtatgagaatcgccaatgattggcaataaatgctttattatcgtatccaatggacgaagtaggtacggagtcatgtctagactctgaatgtcaagcccccaaattgccattggaaatcagactagcagcggggtttgacacgaagtattaaggaatctccgcgaaccatttccacccatttgccccactgacctcaggggacgggacgccgggtactttttgacttggacgagggccgttgacaggtcgatattcgctgatatttcacattcctggtcggtttctttgtctgacagtgctagtggtgagtctagattggaggcgcagacaatacacggaagggctgaagctgtgtgcaaagtacttcgtatgtactccgtagggaaggtcacttataatagaagatcgtcgaattgaacaatagtcgtgatgattagcttgagaatgtcgagagcattgaaagaaggcggaaaaagaataggcagaatgttctgtgccaccttttttaagatctcgaagactcaacacataaaatactccaacttcttacaatgcatgtttcgagacaagtctctgagaactgattccctttccctttctccaataagatccgccagaacaatccggccgttagatctagagatgcgattaaccgggctgactaagcctatttgcgtcattccctggacatcggcatatatagacttatgttgtacatgtacatatatccagctgcgatctcaactttgttaatatcccacctggacagacatcggaaaccgacataatctcgaaagtgcggggaacagctgcatatcaccatcatcatccaacaccaactacataaaatgtcgacagacaacccgccccagatgttatttttcgatatgtttggcacagtagtttcgtggcgtacatgcgtcacggaagagctgagtgtggctgccttacatattgttaattatcccagcaaggacctcccagccgacttgcgggaccgtgctgcggccatgaccagtgacgactggctggcttttgtcgcagaatggcggcagacttacaatgtgttcactagtacatttgacacatccgaaaagtttatgtccgtcgaccagcaccactacaatgcgcttcaggacctcttgcggcagcgcggtctggagggcctgttcactgacgagaagctgtgggaactctctttcgcgtggcaccggctcaacccttggccggatagtgtgaaaagtcttgagttgttgaaccggcgctttgccacttctaccctgtcgaatgggaatgtctctttactgcaggacctccaacgtcatggatcactgcctttcacgcaacttgttagtgcggagaactttggggcttacaagccttctccattggtttataagggtgctgccaggaagtttggactggagccaggccagtgcggaatggttgcagcgcatctgcgcgatttgaaggctgccaagagctgtgggtttcagactatctatgttgagcgtgagctagaggaagagatgtcacaggagcaggctgcgaacgccaagactgacgggtacgtggatatgtggattgatcttgagtctgatggcttccgagaggtggctaggcgatttggggttgagtaagaccggtctaccctctggtctggggctagtagttgagactggttccggtggacaacgtgtatatttggacaatttgaatgaatactcgaaatataatcggtccatttagcccatcctccattccgacatgtattttgcctctcccatcgcctcattccaaatcccccaacatcaagcccaaaggatattcaattttcgccacccagtagctggagaaggtataggttctggattttcattcgcgatgtgaagaaattcgcggattggaattccttccagtgggacaagccgggtctttcgccaaaatttgcacccaaaatatagggcaaatataagcggaatattgaagtatgacgatacaaagatctgagaactccaattgccctcaataaacacatagaatccacccgtgagcagaattatactgaaagaaaccagagaaatccatgccgcatagggttgaaatgggctttgccaaggaagttcagtacggctaatcttttgcttcttacagccataaaaaaacctcaaatagatcacctctatattgatccaatgcaccaaagaggcagctgagaccagttgctggagccaatcaaatacaacagaagctgcggatgatagcgtcatataccccaaggcaagaaaagatccgactgcggcaaccgatatccaaggaaccccgaagcgattgatgcgagtgaataattctggggcatgcccctcttgagcaagtccatatagtgtcctggttcccacgagcatggctgtatttgggtaagcagaagtacagcagccaatggaaaaatgcatactcaccagaattaccagcgctccatgcacttgtgacaacgacagcattgatgatcgaaggtaccactttgatcccgacattagtggcagcaatcgcgaatggagacgctccagcatccccggaatttgacagcaaccccttatcattggaggggacaataaggcccatcatgaaaatggtgatcagataaaatatcaggattctccagaacacacgtttggcggccttggggatgttatgccgaggattctgtgtctcagctgctgcaaccgatatattctcgacgttggaaaatgcataggctgcactactcaagacacgccaaaacccaaggaaccgtccccatgagccgttgattccgagaaactgcacaaagggtccagggtctcgccaaaatcgaaaccccatgggataaccccgtggacctgcgccagaggtaatgcatacactctatggaaatcagtcaggaactaaccagaatattgctcgagatctgctcaccatgatattcacaccaacaatcagagcaatcttcaacattgcaaaaacaaactccaactcgccgtaaatactgaccaacagcatattactaacgatcagcagtgcgccaagggcgctaatccatactgcatggttaatatcagaccaaaagtcgatgatgacagcgcaagccaccatttcagccggcagcaggatagcatttgcataaacactattccagccttgtgcaaacgccagagcagggtcaacgaaccattcggcgtgtcttatgataccaccggaaagaggcgccagagcactgagctcagccacggaaaagaccacgcagcatataagcatacccacaatgcaatatgccagcaacatgcttagcggtccaccccttgctaaggattttccggtcgctaggaagaggccagtaccgatggtcccggccagggctatcatttgaatatgacgttgtttcagccctcgtcttgtttgaacgagctcggaaatgactgcctgtgttttagggttgtcttcacccgcgaaggtacgtttgaggagaggtatggcctcattttcactggtaatctcttcattttgctctgagtgctgagaatgactgttcatttcaaatgatcggatgggaggggcaaatgaataaaagaggacaactaaaagggtgaagaggggttaaattgagaagtgttcttaggcatgtgtgtggttggatggtgataagttaagaagaacttatattgaagtcgtgacaagaggatgtttcttattggtgcatgacctgcagccccggcccggttgatattgccggcaccaaaaatggaagataaaggatatatcaccttttctttcttcctcgatataatcttctatcctactttccgctttggcttttcggaacctaggccaagaataatcttagtagaatcgccggagtcggtaacattgaattattatatgtaccgtgctgaagacagtcgtctcgaggcaggacagagagtagtgtggccgtattcctattggtaaaatgccgagtaggagagttaatgaatctggaatattctctttattaggaatataactacctagaggcgctcctatgatagctttaatattataagagtataagctttatattatttatagttagttttaaaaatactgctaaattccactctttccttactatctaatctcaggcagtggcttactataccctattcttatactatcggataatctcctttattatcactcacttttcactcacttttcacaccctccgcacaactatcgtataaatataccttcatcgctaaaccatcgagtctgcactgcgggactaccaggcatgtataccatcttcgattgatactaggagaccttaatctcgcaccccaaacattcaagttccacctagagagcactagagccgaattgctagcgaaagatcttaattcaaacaagatggcctccaagcctcaggactcaccctcttggatcactgaagatggtagcccactctgcggattctactggatgagaatcgatccgaaagtgcagcctaattactgggtgtaagcatgttttccctaggtcctttggtggatatttgctcacgcataaattctgaagccaacctaagaaattgtgcgaatgctgggagcacttcccaacccagtggccggttgaccatgtaatgatcgtgagaattctaaatcaagtcgccctaagaggtaacctttccatgactgactcttgtcggtctatcaaagcaaatccctgcatgtgccttcaggtgcccatattgcacggcactcgataacgtggaaaaggagggacgaccttgcccggtacgggtgaaaagacatatcaacgcagcgcatatcgtgagtactccagtatacttacccagggaatgacgctcatatcacttagagaagacaaagagacttctatatgggactacagatttcctgtaagtgtgcctcaaagtcgaaagaagtctatgcatactgacctttgctgtctttagtttcaggttgcttccagtccaatgccatctcaactcgcagtgcagtgaagaggaagtcccgtccgagagcccacatttacaatgtgcatgagaacaggtcgccatagttatcttatgaaccggctgaaaggacacatgaacaatgaaaaattgaaccctcaatgaagcccagagtctagacctctattgcagggcttggttttattcaacatgatactggcacccacgagggcaataagtgcaatgagaagataggggcgtatgataagaaatatttatcactcggataccagcgggacttcttggttagtttctaggtaaacggagtggacgaggattccaaaggcgtgtctgttgtatcgacgaagaccctgcgatcaaatttggtcactcagcctatgcttactggcttgctctatttcggcgatataagatgagtgtttattgactttattgtctaacgagttgatgctgagattctgcagttgaataagaccagcataaaccccttgcttgaccataagttcagtatgattcccttcttccaccgcccatcatggtggttttatcatctttgttatactagaaagacgatgtgcaatcgagatcatgtctccttcagagcacggccgcgagaatttccttctcgctactggagtcgagggaaactgtagctatattaagcccaaaatcccttcaagtccttgagtagagctcacgcgaccgagtttcgttgcttttggctgtctctcacaacattccgttggagcccacgatagtaccgactcagagagccgataaacagtgctgtgtctgtatttcatttctatgagcctgtacaggcttgagtacatattagctacctcgtgttataatagctactttcttttgtttctgtttcacattggttagatgctgttatagggatgatcaacccaagcgaagtagtatcgaagtcaaacgccgatatcggaaaatgccaatataataccaataatacacactagtaaaatatatccaagccctaactcccatcttaccgctcttcgcgaagccggtatcggaacatcgtcgttgcagctccttatctgatctcttatcagatctgacgcacattgccaaactagtctgcacctgggtattggtaccacctgcagcacacaatatctcgtaatgcaactgaaaattctcactccaccggcccagggagaacccggcgtgctccaccactgtgtacatcacccacccacccccatagccaagtcattcataccctaacgccacctcgcagaccaaatccctcgtcgccttcgaatatacccgcagccatgtacccaagccacacaccctcatctttgtcggcggactaggtgacaccctcgggtcagtcgactatctcagcgacgtagtccgagcgctagacccatcgcaatggagcgtattctcgctgatcctatcctgcgccggcggcgggtggggcatgggccgactgggcaaagacattgatgagctatcacagtgcgtctcatacgtccgaaaatataaggagccccaattcggcgtcggaaaggtggtcatcatgggccattcgaccggcagccaggacgtgatgcactatattaactgtcccaacccacggccagcacaccctgtcttcgaccgccactggaagccgattgtgcgggtgccagttgatggggcgattatgcaagcgccggtttctgaccgcgagggcatattgtgggttgtgaaatgtggcactgcgcgtgatagcccggccaaaatgcgcgcgatgtacaataaggctgttgctgatgcgcggcgggcgatgtatgaggatcacgatcttgttgatacggttgtaccattgagtgtgacgtcgcggattgggtatccgccctctgcgccggttagcagtcggcgtttcttgagtctggctagcccagatagtccggaggatccgtctgaggatgatttgtttagttccgacttaagtgatgagcggttccgtgcgacatttgggatgattcgggagagagccttgctgaggcagaaaatgctggtgctgtactctggaagggatcaatcggtgccgccatgggttaataaagaagccctattgaagaggtggcagattgctgctgatgggagtgggcggcaggtctgggattcaaggagtatggttattcctaatgcatcgcatgccctgagtgatagcgatcaagcggagccgcggcggattttggtggagagggtgacggcttatttgaatgacattcagcgtggatgatttccgccgaattggtgagattgtatgatatttaagcaaaatatatttgatcctcatatgaaagagttctcagaatccgggaggtcaagaccaacgaaatagttcaaaacaactctaccctgtaagtgaataaataacggtacctgcactggtgaattccgggctaaagacatcgactgtaagcctaaggcggctgctagttgtaccgaagatagctctagtagtctagtcagaccagccttgatatagtcaacttctactgcgaccagttattgtgcaactatctgcatgatgccgcaccaccacactagtactataaactatggcgaattgaatgaggacactattattgatatcgactccgatatagctgacgatgaagcgcggccacctatcttaatgacgatcttgacagcttttaaatatggtatgcctctattcttacccaccacagtagtcagtctaaagcggttaggaacggcagaaatctcataacaatcctattcttattccactaccgaggctgaagactaaaacggcaataagattacaataatcctacatgtttatagcttaagccttttggccacatggcttcctcccctttctccacaaatattgatacatactatctattattgagccttgacacgctcacatgatgttgaactagtcccaccagcatcgttgatccaatcaatagcgtaacgggaggatcatattattgaccccaacacgttttaaaggcatatcgtcggggatctttcgggcacttggcacattgagatcgacatctactgtgtctacaatactccgtatacagtgtgcaatatacgcatgtgatcggaacaaccttggaaagatggacaaccccctcgagcagtatttaagtcacggatcaatattgaagatcccccaagccaagatcgggccgcaaggaataattttgaaatgtcacatcgagtccatttccaagaatcaattagtttcccaagggccaatctgctgggaaccgccctgccgatcgctggaagccgcaacgcacgacggatgcaacacatccacaaaccaatgacagatatattgcagattcaggggatatgaccaagagccgttgcatcatgcacgtcaacacaaggcaggtgcaaaccgaatcccgtcaccggtactcctgagccgatatgaacaatatgctcgagattagaatcctagaccagggcgagaccatagcggatcgttgaacggcacaaattcagcgttccccatataacggccaggcgggaggagccgttgaccaaccaacccctgccccttcaatgaaatgcacggctactgatggtcccacggaaagagctcccccttacggagtagcatggcaactgagccgttggcccgggccattccgtgtgaacagggggatgaaaccatcctaggacgtgccctagcaagttttgatctttaaatgctatgaatatgctgatatgagaatctaaaatataactgcagtttagggttcttctcttgaaagttgaccggaagaggccgagccgggatgtacttctttcagagaaagagaaggagaaagaactggttccgcccgggcccggcctattgcattcaaccaaaaaagtggacggaaacagtttccccgatataactcctcccctggcccgcggccacagaactgggacgggaaaagggagccattccggatcctacgagttgatgcccaaccagttgcctactagggaaatagagcagcagatttgttcgatgaaaagtaagaaaaattaaaataaaattcaagccaagcaaattcaaaaaaaaaaagaactcatacaacaggagtacatagtacatacccaccttccgaacttcctcccgttgtcttcttgcccacctttgtagctagcaaggcccctaggacgatctatgtatcaatggggacacttttttttttttacgcgcccctccacgggtggacattgcaatggcatgaagactttgacattcaccggtgactataggctatttgaacctattggccagatcttaggttgtataccggatgcatgcgcaagagcggaaaaatgacagtgacaggggtcgaatggacagggggtataacgtggaagggacgataacgagagccaatctaaggtggccatgagccatgactcgatcctgaactagttcgaggttggcgttgaacagtcacagagatggatgttccggaatcccaaatccacattcatttgacttacgctattcgggtagcgtctcccagggccatggagagagggagacttttgttccagggtgttataattgtaaggggagtatggagtacggatactttgatagtacgaactcccacgtttcaaaaaccacgagggagatggggacatcgtgtgccaccatcgacactaatttaattaatcccattctaattgcaggacttgagatagtatgtacaacataaagagaacatcccatgcataataaataatacatcttcatggtagggcagtgaaaccatagatcgtgcccccccacgtgtagattggggtacacagtgccttagtttgagctgtacctagacgaaccggcccaaattgttaaattcaaaacaagaagaaaagaaaaataagaagctctcagcttctgccggcagggaaatgagcttcagccaagttacggagtacggagtacatccgggattatccactgtgccctgtgcgcttctccttttcactgtggacctttgggacctgggctttttctctcttttctgttcttctttctttgggttataactttttttggggtatatatgggtatcttctggctcattttctccgagatcgtcggatccggtgtaggttcagtggaatgggcgtccagttccagagatcttcggatggacggagtatatagatggctttttggggtatattaagataatgaaagggtgaacagaagaccccaaggtaaatatataaaaagaatgaataaatgaatgagtatcagcacagccctagaaacactatgtggatatttagaaaatgtgaaagaaaatgtatgacttcatggagctgtcacttgggctttttctccctaattataagattcctaccagtcagaatgaactctccgatgtctttatttttcatgtccttttataggtctagctctgattcatttttttcctttccacatccgaaacggtctcagagttagcgatgtagagaataacgaacgggggatagggatctcgggagaagtacaaaatccattctctttcataaatttggtatttttatcttctattctgttcgatatcctgttcgacatttctctttccttaatattctctatactctaattctaatctcctaatatcctcatatccctttcccttgaacccctctctccacttcgttccagcccccggaccagacttcgcacactggtcttccccctctctctctcttgtctctcggctctcccttctcttttctctaattccattttctctcttcccttcgctctatatctccccctttgcatcattcttccggcaacaattgggggttgctgtgaatcgcgtggaagctcccgcttttctttttcgcccccccgcctggaacgtgggccacttcactcacctttcccccctccttgcgacttcgaacatccccccctctttcccctgaaataattataggtatgtcgtggacaagacggtatcgctatagacgtactgacttctctaggctgattgtctttgctgtttcttgttctcagttccagttgcccgccatggctggaaaaatgacgttgtacaagctggtggtgttgggagacggaggtgttggaaagaccgcccttactattcaggttggtcgacctagcccttgacctctgggcaacaattcttcatgacccatgactaaaacctatccttctagttgtgtcttaatcactttgtcgaaacatacgatccaaccatcgaggattcatatcgcaaacaagtcgtgatcgatcaacaatcgtgtatgctcgaggtgctggacacagcgggccaggaagaatataccgcgctacgagaccagtggatccgggatggcgaggggtttgtattggtgtatagcatcacatcacgcgcctccttctcccgcatcacaaaattctacaaccaaattaagatggtcaaggaatcgtcaagctccggttccccctccggccccagctacctgaactcgcccatgaccgcctccgcgggtcccgccatgcccgtgcccgtcatgttagtcggaaataagagcgacaaggccgtcgagcgcgcagtctcagcacaggaaggccaagcattggccaaggagctgggatgtgagtttgttgaggcatcggccaagaactgtatcaacgtggagaaggccttctacgacgttgtccgcatgctgcgccagcagcgacaacaggcagcaggtggccgtggcgcagaccgtcgcccaacaggcttcggatcgggccgcgatcgcgacgcaggccccgaatatcccaagtccttccggcctgaccgatcgcgacatcgcagtcggctccagtgtactctcttgtgatcggccgggtccgtccgggaggcgttggatttcttgctcactgaaataatggctgtttcctttttctcttttcctctcttccttttggtcccgggtgcatctggagggtggttctatcttttggttacttcgttcggcgtcggtggtccttgccatgctacatcttttacgctcgcattttgaagagcttgagaaccgacgtggagatttgaggccagtgtctgcaagcctcgagcgcaaattttttcttttttgttttggcttttgttttgttctttcgaaatgcgccgagacatgcagactggctgtctggatttccacaagctccgcttactctttttccttaccaatcgtctctcttcttcggtctctgcttatttgataagttgcgaacggaggaatctttcggacacgccttggagcaccccgacagaaacaaaaaaaaaaaacaccccccaggcaacgaagccagaagatcgcagtcgcgcattagcaggcatttcgatatgataccctacgactgagcttgttttatttgattaatttctcagccatttatgcgatatagacaattgataaaggtcttttttttcagtcggttgtaataatttggaaaatccgaagcaaaagtacacctgagtacaagtgcagtacccgattccaggccgtacttgagacagcgcatgaggtatactccgggtatactctgggtatactctgaggctggggacaagctgagtacagaagaaagtgcggggaaaaagcacggactcgcctcggctgcatccgggggatctcagcttcaccttctccccgcaaatggcgagtcacacacacgaacgcctaaaatgtcttgccgatcagagccttgcaggtcttaccttccatattcccgtgccaatcgcaatattggatccgaaacacctcgggtagaagcgctctatatcagagctcctgagtactattctttgtcttgtatgagctgtttctctcttctcggctcaaatcacaatcccggcaaataacttcgcctcttcatcatttctgtagactgaatccgaaacctatccaacatgtcttcgcaccctcaaccgacaacccactcacattcccttggcgatccagaaaccttttggtcccatcatgcggccagactccactggcaccgcaagccttcacgtgccttgacgcggcagacaaagtctctcccgagcggaaccgagcatgagcactggtcgtggttcgccgatggcgagatctccacaacctacaattgtgtcgaccgacatgtgctcgcaggccacggtgacaatgttgccattgtatgggaatcaccggtaaccggtgtaacggagaagtatacttatgcccgcttactcgatgaggtcgaggttcttgccggtgtacttagggaggaaggggtaaagaagggcgatgttgttattatctacagtatgcaattgtgaccacaccacaagtggagaattgattaaagacagaaacccactgctgactacgtatcggatctagtgccaatgatccctgcggccctagtagctgcgttggcaataacccgcctaggcgcaattcacgccgctgttttcggtggcttcgctccgcaagctctggcacaacgcatcgaggccgcccgcccaaaagttctaatgacagcgtcatgtggaatagaggggtccaagggacccatttcatatcggccactcgtcgaaggcgccgtcaaggcaagcagctttaagccgagcaggatcattgtctggcagcgtgaccaactgcgctgggatcagcccgataagcgcggtggccagcgtaattggcagagactcgttaagagcgcacgattccgtggggttaaggctggacctgttcctgttaagagtacggatgcactttatattatctatacaagtggtgagtgaatcccagaaccgaacccaattcctgatctgttttgttcatacttaaacgtttccacaggaaccaccggcctccccaaaggcgtcctgcgtgaagcaggtgggcacgccgtgggtctggaactctccataaagtcgctcttcgggatcaaaggtcccggcgacacaatgttctgcgcatcagacataggctgggtcgtcggacactcttacatcctttatgcaccgctgttagtcggcgccacaacggtcctgtttgaaggtaagcccgtcggcacgccggatgcagggacattctggcgcattgtcgagaaacacaatgtaaatgccctctttacagcaccaactgccatgcgagctatccggaaagatgatccggacgaccagcttatcggcgaggtcggaaagcgcgggggattgaaatctctccgtgcccttttcctcgctggtgagcgcagcgagcctggtattgttggctcatatcaagatcttcttcggaagtatgcagcggatggtgcgcttgttattgacaactggtggtcgtctgaatctggatccccgattacgggtgttgcattgaatgggagtgctgcccttgctagtctggcatccgggccagatcattctcctctcacaacccgacctggctcagcaggtttcccactgcctgggtttgacgtccgcatcgtcgatgacgagggcagtgaagtcccgcgcggtactatgggcaatatcgttatggcaccaccactcgccccgtcggcattcacgacccttttcgaggacgaggagcggttttaccgtgggtatcttaagcgtttcaatggccgctgggtcgataccggcgatgcggggatggttgatgaggatggctacgtgcatattatgtcgcgaagtgacgatatcatcaatgttgccgcgcatcggttcagtaccggtaaggaagttgcctttctttcgctttctagattattgaaggataaacgatttgactaattcctacaggatccattgaacaagcaattctctcgcacccattgatcagcgaagcaagcgtcgtcggcatccccgacccgctaaaaggccaccttcccttcgcattcatccagcccaaagccggcccaatcactggaaaaagcaatcctcttccagcaacaccgaccccgcagttattcgccgaggttaacgcgctggtccgcgagcagattggggctattgcgtcgttgggtgggattatacagggtcgggggatgatccctaagacgcgaagtgggaagacgcttaggcgtgttcttagagagcttgttgagtatggggtgaagggggagtatgcggcggagattaatgtgccgcctaccgttgaggatgcggaagttgtttctgttgcaagagagagggttagggaatattttgaggagaaggagaaggcaaatggggtcggcaaggcgaagctttagatgagtgatagatggatgtgactatgcggcacattagagcgatctgctttgactagtacttgaatgtttcgatacatcaaggggttcataaagaagctaacagtcttcagcatcatgcttatcttgttataagttatttagttcagcgatatatgagttgaaggatcctgttcaatggattacatcctaactcgacaagaaatttgaggtgtagtaaccaagtccgatcaatcttctgtagaatacatcgtgggcagcccctataatcagctgccgtagctagcatcatacaacataccatccttcccctgagctactggtgtaacattatgcctcaattttaatgcaaactgctggtaaggtctctacgctgggctcacctcatataaaatcgaaatctccacattcctttcccgttacatcctcgctctcacagagctgaggagaaagggtttgtcatctccaggaattacacccgcagttgccgtgcactcttacactcgacaacgatatacatatctcatattcataacgaggatttgtcccaagatttatgaatacaagttgcaccggatgttggatatagtcaccttccggatgccggtagtggctagggttttggactatcgaactgcttgtgtccgccatgtttacactgctcgagcaaagacaacaataatttggtggcctatacttcagcagagggtgatatacccaggaattgaagttataccgaccgtatagactcaattttaaagctacctggccgcacaaaccgcctttatacgaaggtcctgggtaatatcaaagatattcccactacataaatttctaaaatctcccatttctaggcgttaaagcctcttgaggcaatcgaccatgtatcgttaatctcgtcgattctactgccccctaaccgtatataccactatatatccttatcgtcattgatcctcattgatcccgacgaaaaacaggatgtagggtgtgaatagcttcatgtttcaagcccttaaggcgttcttaaggatcctgatactctgcttactaggtaggagattgtcatagaaatacgctgcacaattttccgtcatgaagctattcccatcatacaaatctctgtattcccccaggtctagggtggtttgaagatgttccgatcgtacaaatttagcttcgggctttagtatctcgcatttgaaagggtcgagatcaatccgtagaggcatacattgacgtgcggtatgaatagcttaaacgccaggaactagagagagatggagctttgtacggtcagaagaagagcgtcaacgtcaaatccgagggaaatggagatttgtatagaatatcttcaatgttgtgcaagaaatgtagatttgttgaattcaagagagagagagaagagagccttccttccgctcttctctcccctttctcgtgactttgaattctcccaatttgacttctaccacatctgacatgaatatttcacgagttcccagccttctcctcctttactcccctgctaatcaagtagtaatcaaatattacactggaggcattcaggaatgaattctttccagctctcttgccctccctcctttgcatttccaactccttaagtctccactctggtcacaatggagatctcaccttttgtttacaagcttaaaatcctgaccggtattcaccttgtcaacttccccattccaaaatcccgatcaccgagtggtctgaagggcacacatatgacgaggtgagcgaagattgccccaagcatagatttctagatagacaccttccatagccgatgtactgcttcatcttacccgtaccgcccacgtgaccgcatatcccgctatcatattccttcccctgagctatcagcgtaacattacagcttaaagcacgccaaatatagaacatatttatgtaaaagtagactagatcaggtaaaactcaaagtgtttgcccttgaacctctcgagctgacaggcgagaaaggccgttcttctgcttcttgttattcttcctccactgccacctttcattccttgttatatcctatgctccccctccaagatggagccaaccaagttcccaaagagacccacggtgcgatgggacccatacaagcgacaggtactctgctgtttatatcgattctttacttgcaacaagaaacaaaccgcagaaatattttcctacatgtttcggagccatctgaaacagcgtggcattcaaggctttgttccatttgccacccttaacacccaatggatttggatgagaaacaaacgggatccagtctggctccgtgtgcatatcaacaccgcatttgagaccagtggcgagtggggggagattattacaaagatcaaatctgcagccaaaactttgcggttcgaactacatgagaagatggaggacgatactcacccatcgcgctgtggtcctttggtgcccgatgccgaacagaatattgcatccgttagtgacctcgaacacgtccaatctgcatgcaagctaacgatttattctcctagcatggacccgctgtgccaatgctttcccaatcattgtttactgcggagactctcaatccaataccattgttgtccccgagccaggaccaagccttcgaaggaagatacagagcgaaccaaagcgccgatcagagcatcgaccagagcatcggtccgcagaacgaccttcacattgatatccccaatagaccccacagatctaccgagccggtggtcactagcaacggaaagttgtgcctctggtgtgagcatgaaggaactatccacgagtccgaggacatccaggaactgcaaaacgaagactacgattacgacagtgaatatgaggagcatagtgatggcaatcagcataatgaccgacaagacgatcctggtatgacagattacatccaaggatgcaaacagttcgtgagggagctacgtggtgaagaattgtttgattcagagagcgagccgtacctgttgaaaccccacaaaagcctctcaagaatgcactcattttgcgacccgcacttgcccttaccgctaaacctagaacaagggtctctggattcggaggataattcagattggtgcgctgacagaggaatccctgctaatttggctgattttgggagcctttcaatcgcaatgaaaaatcggagcggtgcccttggcaatgagcgaacttccacacaaaaaagttcgcgcagtttcagtttctcccatacctgcacagatcacgatgaggcgctcggcgaccgcttaggtggtcagaacgcattgcagtatgaatggccctcgaatgatagaatgaggatggaaaccctgcgccagatgtccgtggaagctctccgtcaggttgaagaccagtcaaccactcacctatctcaggaggaaattgatgtcttgatgtatgacggcaatacctggaagcagttgtagggagagtgagatgcatatacataatggggtctagattcaagtgtctcatatttcacattatcgaactaggaattaggcccctaggccttaaacaggaaccttggtttttgttatggtctagtggtagaatgtgctgtatactttccatcagacaccaatgtatcaatccaaattttattaatttgataccaagttcaagcatgggctattatgctgtaggccgctaaaaagtaaacagcctttgcatttctctatcaatatgctaatcttgactttctcatgaaagaaggcgggctcaaaccagatctgagacgggctttttttgtcaggtatgaggaacataaaagggatcaactgaaaagctatcagaaaaacagaagagaaaaataacagtgaataattggttagctcaacctgaaagaaaagagagggaaatatccatattcaatactcatagagtaacaaacatcaatgatggctttagggttgaaatgttgtagggagaaaagggatggggatcgtgtgagggcggggataaaagagaggatttggtggttatggtaacaatgaaaactagaaattgcctagttgactatcgagaatcgtgaagattcgaaggttaaaatgaaaagagagatgtagtttgcttcatcaatatatctggaagtcaccagatgcacctaactcatgttgaaccaggtaactatgttaaatctttcagctgctcctcaaactttgcccactgacccttcaccctacatgcagaagtccagtagttccctttctcatcctttccgaggataaaaaacccgtccgcaggcttcacagggccgtgattctcctgaacatatgaaggcctgcacggcatgctgtcgtctttagggccctgacgagccggggaaaaatctaagttgaacaagccagctttcgaccaattggagaagccgacctgcgccatgccaccatctccaaatacgataataggtagaccggttccggatgtgcgaaccatggcgtaatatgcctcatgttgagcacgcgtgccctgctcgttgatagcgcaccggacctgctgtgcgagccagctgagcggcttggaagttacatcgcccgcggtaacaagtacgttggcccagccgaaagcgttgccaacgtagggatgctcggtggaagcaggcaggaggtcaccctcaaaagatctgcggagtgacatggcgattgatgtagctacctaaggagggtgtagtgtgagtagcttatttaacagggttacagtattggagtttaccgttctctcagggttcatccccatctcgccaaccacacagcgtaaaatccaggccgtcagaacatcattctcagtcaaaaagaccttcgatgggtcttcgccgttcgcagtcgcctcagtacaaagctcgtctacagccttctcccattgcggccgccaatatgtctctggaatacagaccatgcggttctccttggctcggacaagcatatcgaccccataacctaagccccaccgcagcaagcctcctagcccgaccctcctgtcagtcaacacatgttcctcggtcgtagggcgcgacccctgggcgagagagtggaatggatccgagtttataccacatgggatcaatacttcggcagtttttccccaaagcatggagctccatcctgcgacgacatactgcatgcccagcgcgtcgaaggcagcatgctgccattggagcactacgacggtcttatcggtgaaagagttgacgcgcaaccctaagacaggaaggtcggaggtgaggtagtcgtttatcccgttgggcttgtacccaggctcccacgccaggccttctaggtcatctgggtcgctaacaacacagggccgatcttgcggcttcgggattcgagaggccgtcgggtgtaaagcggcaggtatgccatgattgacatgggcgaaggatattggtggtctgccgatcgagaactgggctggaatgtgccattcgatcttacctgtggcctatttggtaacgccaaaagtgttaactagtataaacccgtgggcacttcatatgtttatgcagccctagattttctctttgcagatggcccattcttacattcttcctcagtcttcctcctaacctttgccacccctctcgtttgacgaggccctcaagggattcgcgcaatatttctgggtcgagcactgcataaaacacgagagatacagccatgttattaccctggacaagccaactatcctcgaagaaatggagtggaaccactcgatcgcccggaattggctccatggtgggctgacgccaaaacggcattttcatggtgtgaattgctctatcacgaacagaaaccaggctgcctcaaagaaagattactgcaaaatacttctttgaacaaaagaataatcacatgcattatgcagctggaaacccctattctaagttgcaggcaaaaacatggcgcgggggccatttcgttgttctttgaaggctagatctaatgtgcactatactagtgtcgatctccactcattctacttgagaattgacaagtctcctctcatgatactttttgctagcgtgaaataagtaccatttgtggaggagatagaaaggtatatttgttataggctaaaaaaggatagtctacagcagttagctctggtcgcaggatgagctagggcaaatgagactccacttggattttacgaacctccgatattactggctacagtggtttgctacggttctggatcaactgttgacaatgttttagcccgcgtagcaagaaatttgccaacactggacggggttttatacaatagtatataggggtagaagacctatattgatatagatttaattaactccacaatcagatacaatggatctggatacgaccccaggaataccgccgccagatggccaggaatcacatttccatgaaccctataactcgttgcaaatagggactgtcatcgcctttggcatcacctatctcattgccacggttttcctcgctcttcgctatttccaggctttcaagctgaccaagaagatcgagatagacttgagtaagagaccaacttcttcaacactctgctagacacttattctactcgatagtcactatcacgatttcttatggtgttgcactggtatattttgtgactgtggttaactgcaagtctcccgtgactatctttcgggttaaggtataatctgactcaaatagtaatgaactatggctggggaaagcacatgtggaatgttaacttggaagatctcatggggtttaataaagtaaagacattatttgcataccctagcacattggctaacaagatgcagggtctactcatcaacaccttgacttatttgatatgtccatgcatcaccaagatggccattctatctgtcttatttcaaatcaatcctgcgaagatatatcgttgcctcgtcgtggctgtcgcactggcgatctttgcgtacactctgaccttatgcatcatcaccggaggaccatgtaaccctctccatgcaggaaccacagcctgtctagaaaatgtcgccttatcccaggcagttctgaacattgcctctgatttggcagtgattgccatcccgatcccaacgatacaccgtctccatttttcagagaaacaaaaggtcacggtcggctgtctgctgactttgggatctaggtgcgctttccctcattcttgaattgttctgatgccatgattgccgctaatccccaccccagtgtcgtcatttgctccatagcacgcctaccatacgtcttactcctcggcaaaaccgctgacacaacttataccgaagccatcctaggagtgtggtcccttgtcgaggtcaacctcggtatcatatgcgcctgtgcaatgcggttcaagcgcctaatatcgatatatctaccgcggctttcgctatccccatcgcacacgccccgtactgcgaaactcacagaggacacacctatgaataggttccagcccaaaaatactggagggcaacactcataccagctacacagcatccatgatggaaatcccaatccgttagctggcacgaaagatatctccgtccaccgatcgtttaaggtggatgaagaacgtacatatttgtaccgcagagacaatgatagcactgacaaaattttagcttgagtcacatatatgtcaataacttgtgtatatttatatattttgcttttacatcagtctcatcacctattggtatgcacgatgtagaattctaccgaaatacccgtggttaaaagatctccacgctcatggcttgctgctcttattgggaatgaccatagaaggtcagttcacgtaaatccaagagctgacggcaacctactaaatggacacaacctaacgcagggtgatgactacgacttaatctgcaagatattcgacattccattctcgtcactgtataagtgaaatccaagcatcggtccgttcatgcaacccaaactatatggtctgctctgctaacatcctcctaggctcggattgcactaatctctggatgaacactcctgtgggttaacatatcatgaccatcgaatgattatctttatactccgatggcaatacatcaaaacaagtacaagtagaatatcggggtccagtgcaagtaaaataagtagaaagtaagagatcattcttgatcgaagttaaatttgtgaatataataaaacgcgctatgtccaggagaataatgcgcaaaaaaacaagaaaagataagctccacaagaaaggcagacatgaaaagttaacccaagagggctcattatgtattatctaagacgtagacaagacatatacaccagaagaacccacagccgtaaaaacccgacagcatcgtgtggttttcatcaaagcgataacaccagtcacaatgctatctcttcatgatgccattgacaatcaactgctttacagcaggagagcaacggcaccaaggatggcagccaaaccggcaccagcaccggtagcggcgttcatggcaccggcgttgaaggcgggctgggagggggtaacagcgctggaggggctggagggagcactggaggggctggagggaacgctgggcacgccagtggagccggcggtggggaccagaggggtggaggtgacgacgctggggacgacggggatgaggggagtgctgctgctggccacggggctggaggccaagggagtagagaccacgggagcagagggcgcgggagcagatgccacgggagcagaggccacgggagtagagaccacggcggtggaagagctaagtaatgtgttagattaaattaattggtcacgttggatatagagaaatccttaccaggagttgcactcagtcacggtggaggtcgagatgggacgggtgacagtgtaaggaccgtggctcatggtgatgtagccgggctggaatgctgttagtatgcggcgaagacttgttgctcaggaaaacatacggtggaaatgctgtaggtgtggcttccgtgtacaatagaggtagcctcagggcagtaggtggtgtactcggtgagggtctcggtgacaacaccggccatggcaccagtagcaccgagagcgagagcggcaatagagaaacgcattgtgatatagttgatagagttggaatggttccgaaaatgttccaagatgaggtatgtaaaagaatgacagggattcaaaagaatgtaatcggttgaaaaccggggatttagagaatgcagtggaagaaagagagaggaaagaaggggggggagaagagtttataaccaatcctgtagattaatttaaatgagattcaggtacccgctgccactcacacactgaggaaaaggggcagatagagtggcaataagagagtagcgaaaaataaacaacgaaagtggattggagccacatgggaggtacttaattgtacagccaaattaatacgacggctaaagtcacttcctccctagcgttcctcctcaccttaagcgcacgctccagggaccaggccgtcccttcccatttaggcactgatgggctagcactggcgattgtaatttaatgatccagggtcggagtaacttgaacgtacggagtatatatctatattgtaaatgacttcttattctgtggttatgccaagacctcaaaatagatctccaaaataggcatttggtgtcttgtacggagtctccgtatcctattttgtatgttgtagatatcttttgagtgaccagtcttcaatctccagtagattacgtctaactaattcaatatgtacatagttatctaagtacttccttaaattctaagatcgtacttacatacatcgaagccctaattaactacctaactaggtagaacatacatgagcatcaacacctccccttgctggacagtatagttgttctagccaattgtctattgtgagggtggagtgcaagaggggaatgcgagtcagggtcgtggaaggggctagttaaatcgtgttaagaatagtagcgactatatactgttaaactaattatactcgagagtcactcggagcatacggatcgtacgtcctcgttgtactagagtgtcgacaatgagacagcaaaaaaacattgtcgcgaaggggttcagagatgtggatttagcacagtagatcaatcctgaccttgccttggaggtgaaccaacacaacaattccaatccgataagtactggcccctcaaaggatggttaagaggcgtgggacctttcagcagcgcccgtccagcgccagctagaccgaagtccagccgtcaccgacgagtgctgacacagattaaaacgccgtttcttcatcttggatttagttgtgtgaagaaggaaaggagggaaaagttttgccgggcgaagataaaccaacagccgacgcacggaccaggcggagagctcgaatgggaatagcgcattttcccgctttccgcgggcaacggaaaggtgccagtgctcgtccgacaagcatcagtcgtttaaaagccgtggctttcctatcggctaagtacataataccctgcttgagaattgaccttcttcagcttcatcatgtatttgtctcgctgtggtagatccgctgctcgcttgcttccccttgggagctcccgggcagccgttgtctccgctcgcgcctcgatcgtgcccagattagctcctcaatcgcggggagtagcgtcgtccactcgcgattcgcagcacaaggttggcggccagaatcgattcaatggcaagcggaacatgtagactgactatttgatagctgctcgcggcatccctagaggagtccgaccccaccgtttataacatcctacagcaggtgcgtcatcgttggatatagagctcaccaatcgaacgaccaggtgctaaaactatcacaggagaaaaaccgtcaaaagcacttcattaacctgatcccctcggagaatttcacatcgcaagctgttctcgatgcccttggcagtattatgcaaagtacgtactccgggtggccgcctctgcttgctcgacagactatcctaaccgcaatttagacaaatattccgagggataccccggtgcccgatactatggaggaaacgaatttattgatgcctccgagcggttatgccagcagcgtgccctcgaaaccttccgtctgaacccggaggaatggggagtgaacgttcaacgtatgaaccagttgacgtgatataattaaatatgcgaagactaactcattccagctttgtccggctcacccgctaatctcatggcctactccgccctactcaacacccacgaccgtctcatgggcttagaccttccccacggtggccacctgtcccacggctatcagactcctaccaagaagatctctgctatctccaaatacttcgagaccttcccctaccgcctcgatgagtcgactggcctgatcgactacgatgcattggagaaatcggccaccctataccggcccaagctgattattgcgggtacttcagcctacagccgtttgattgactactcacgcatgcgcgcgatcgccgactccgtgggcgcctacttgctatccgatatggcccatatctcgggtctcgtggctgctgacgtgctcccatctcccttcccctactcagatgtcgtgacgactactacccacaagtctctgcgtggcccgcgtggcgccatgatattctaccgcaaaggcgtgcgcagcaccgacaagaagggcaaccccatcatgtacgatctcgagaaccccatcaacgcatccgtcttcccgggccaccagggtggccctcacaatcacacgatcaccgcgttggccgtggctctcaagcaggctcaggcgcccgacttcaaggcctaccagcagacagtgcttcttaatgcctctgctctagccgatcgcctaggtgattctaccagcaacggtggactcggctacaacattgtgtccggtggcaccgataaccacttggtgctgctggacctgaagaaccgcggtgtggacggtgctcgcgtcgagcgcgttctcgagttgtgcggtgtcgccagtaataagaacacagtgcccggtgacaagtccgccctcaagcccggcggtctgcgtctgggaaccccagccatgacctcccgtggcttccaacccgaggacttcacccgcgtcgccgatatcgtcgatcgcgcggtaaccatcacccagaagttggacaaggctgcccgtgagtcagctcagtcccgcggtgtcaagaaccctaataccgttaaggccttcttggagtacgtgggtgggggtgaggagatctcggagattgttgttcttcgtcaagaggtcgaggactgggttggtacctttagcttgccgtgggctgatgaccagtagacgttttcttttttttgattccctctgtatatctccttgcatgatttcgaaacgaatatgattgaagactttttatttcatttaagactagaaatgaacaagtgtaagaatcaagtttcctggtggaatatatatagtgtggactttactccgcaaagtctaattcgagacggaaaccggggaacggtgtcatcattttattttctgctgcatcggggtacgatatactgctctttatttcttcatctacagcaagacttcccacctacaatcatgaaagtcagccaggtaagaacacggaattacgttgaagacggaaatcaaaatactaacccattgtcagctctatgtctaccctattaaatccctccgaccaacaacaatcacagagggattgttcacggcacgcggctttcaatatgaccgccacttcatgctcctcaaagtcatcccaaccgaggatggctccggcaccacagccttgaaaaacatgcatatcccgcacttcccagagatggccctcttccacaccgatatcgagtatccgcagacagaaaaggacagcgggaaactaattataacataccaccctcctctgtcggactcaactcccaaaccccgcgaaatcacccgactagaaatcccactccagcccaatccgaaaaggctcagccctgtcaaggtcgtaatgcaccagagcccaacaacaggatacaacatgggcgcagactataacgactggtttagcgcctgcttcgggtaccccgtagttttagcctacattggatcgcattcgagagaggtgcttggcacactcgcgccagcacagcaagacaaaaagacggcgctgggcacaatacgcaaaagcctaaccagacccgacaggaaatgggaacggtttctcccgattttcattgtagcatccgcgatcaacatccttcttcagagcggtactctcgttcgcgacgggacaactccccaagcagctcgcagtctgacgcccacgctccttttcactgctagtgtggtggtgctagtgctacatcacttctgcactctgcatgcgcagcacgagaaccgcattaccttcgccgactgcgccccttatctggtcatttccgagacatccgtggataatgtctcagcgcggctgccggacggggaaattatggaccgcacgaagttccggcctaatatcgttgtttcgggggctgcggaggctttcgaagaggacttttggcgtgcgctgatcgtgggcgctggatcagggcgtggggcgactaggctgttgctaacggggaattgtgtacgctgtcaaagccttaatgttgattacgagactgggaagatggggactggtgagtctggtgctgtgcttaagaagttgatgaaggatcgcagggtagattctggggcgaagtttagtcccgtctttggtaggtatgctttcttggagccaaagggcaaggggattattctgagggttggggatgaggttacggttgccgagaagggaactaggaggtctattactggtgagtgtttctgcttttttccaagcaaattatgagagtgaacgctgatttactgggttctgtagattggcctggcctgacaaattgaaaatagatacatttctctttcggttgtacatcgacacggacatctcggtattgtgtagatagatatccggggaattgacgtcatggtggaggttggaattgcactatgtatacagatttcgggcctttctttatcctctgacttgtccaagtcttgatgatgaaacaatacagactctttttatattcttatgcatcaaactacatcgtaggtgagtcccgagtgagaagcataagaaatcaatttaattgggggataaacacacagccacaattacatcatacccgggcaccgccaccagttgccccaattagtcacctgactgtcttggtccatggaaaggcaactaaatgtggacttggattcggtttctaagaataacttgcaataactttgaacccccgtttcttcttcgtttgccgattctattcagtgacttgtgcgactcatcttatacattgcgttgtggtcaagctagtccagccttaccgaactattcagggactgtggctcaagcccctccaatcatcacgcatacgccgctgcctatttggagtccactttaaattgcgactctcacattgacctgtcacgcacccaaccagagctgcattcgacttgtgtgtttcacctgcgtgacgcttctaccccgcgcttctacctcacgcttctacctctttccaaaacgccaattatcccgcgatccggtgcatagttgaggaaggtatcgctgagccccgccgcgggtaagctggcgcagcagaaaaaaaaagcgatcgcaatcgttccaaaacataattgttataatccccatggatccagccaatctgcgccgcaaggacaccaccaagggtcctccgctgcggattctgtcgctaggttagtattatctctcttcccggcgtacatcagactcagctgacctgaacagatggcggtggtgttcgtggctactccatgcttattctccttcaggaactcatgtaccgcacttatgttgaatgcgaaggcaagcctccgcgtcgcgaccagattcccaaaccttgtgatcacttcgacttgattgcaggtaccggcactggcggcttgattgcgctgatgctcggtcgcctccgcctggatctcgagacttgcaaggaggtatatgtgcgtatgacccgcaaagtatttgagaccgacaaaaccatcgctggtattccctatcgctcgactttgttcaaggcctcgaagctcgaggaggcgatccgcgaatgtgtgcgggaacataccgtgttcgaggcggagggaaacgacacggggaatgggccgaatcatgattctatggcttctatggcaagcttaccatacagcccagcctctattccgcaacgctctatcagtcgggccagtttcagcaccgctgctgcttcgcatccaatgtccccgacaagccaaagaggctccgtttttcttaatgggttgcgttggggtaatccagacgcactgctctatgataatcgagaaaatcggacaaaaacgtgagttctacaatgcgaagacatgtgtcgctggtactaatatgaaatatagcgcggtcactgctatgtacaagggcaccccgcgcaagggatcggctgtccttctccgatcatacgactcccgcagagaacctccgcctgaatttgactgcactatctggcaagcgggacgcgcgacatccgcgacagggcttgctttcaaacctatccagattggtcaaaatcattttattgacgagggtcatggcacattcaaccccgcaccgcaggtacttgatgaagctgtcatgaatgagtggccaggtcgggaagttggggtctttatcagcgtggggactggaaagcgcccacctggtaccaataaccgacaacatgaatggtgggaggatttcttcggcgactcgttgggcacatttgctgaagcgcggcgtcgactaatgacgaagattgagggctgcgagggaatccacaatgatatgattcgagaccgtctcgccaaacgcaatgtcagcaaagacaattatttccgcctcaacgtcgaggttggcgttggcgaatttggtatgaacgaatggaaccggctagccgatatcagcaccaatacacgacagtatctggccaggcccgaagtcaagaagatgattttagatgcaggtgtgagatttgctaagatcgatcggatgaaccgccgtctggcaagccatgccgcagctggcggggatcgcgacgacttatcttttgatcttgagactgaagagctttctttttctcctcccattcaatcacatgttccgccccctgcgcacttcgctgtcgaactacctgcggagctacctgcggagtttcttaaccgcgcacatcaccctacaccttcacaagcgccgccacccatcccaaccgtagtgactacatcaccaacggatagcacgctcccggctcacccaacacctcaggataatatatctatttcctcgcctcggcaatctggcagtgattatcgtcgaagccacgagctttcaagccgaccaagctcgcaacaacagagcttgccctcccacagtgatgattattctacaaccttcaatggcatggcaccaccggtgccgccgaagacgcctatcccatacccagctcaagaagatggcggcggcgtgtctatgcccgcgccgctattctcccaagcacctttctctacctctacctcgaatatcaaagtccgacctccctacccagttgatgagccaccaccaacggtgaaccggcaacgcaagcccagctaccacgtacggtgatcccttctcacctgctttcatctcgataccttttttttcaattctttacatgtgcattacgttgtttttgtgtctttcctgctgaatacccctctgttgagacggttgattaaggctgagagggcgtctgggggcatgtaattctatttatggggtttttattttagttgacccactgcgaaagatggccagtgctggcctcgctcgggcataatgaatgatgacatttatgaagattcaaatgtgggaattgatagtctgtatacatacctgtgaggggaaaaagaaccagcatggcactctcatctacatagacatccactacgatataggtacttgattctccgtaaagacaggtgacttgtcccttaataatgtatatgctagcgtatattgttcagaggactccataaactactgcaagcaatataagccgacgtccaaaggtaccggtacctgccgatcgcagcacaagcctcgtcgctagaagtaccggtacctcctttccccacacagccccccagccatctcgatccctttccctctcctcttccccttccccttttctttattattttctttaatgtaatttttttctccattcttctctgattctctgattctttgtctgaaatagattccactttcttgataccctcaaaatccgaactttgtcaagtgctagagtcatagcgccaacggctgaaattcccccttgcggaatcccacctttttccttccctcgtggacattttccagaagcattcccagatcgccgttctaaatcgcagttattcccctattacaaaggtcgttgcgatcccgcgactcggaatcgttgttgacgtccctcgttgatagtcgccccggcgatacgcccagtctttatcgatatcgcggcagcaccactaagtgtttcaaatagtcgctgggtctcgtcttcggacgactctctgtccccgtctcttcccactgctggtcagtgtggttttaatctccagtctccacaatcatggatcccaattccgccttgtcacatgcaaacaacctgctcgcgcgcgcagaatcttcaggccgcccaccagtgtacaaggccgtcggtgtatcgctagctgtcgcatcgggcgtcttcatcggtatctcgttcgtggtaaagaaaatcgggctgttgaaggcgaacgtgaagtacaatgaggaggccggcgagggatatggatatctgaagaacttctggtggtggactggcatgacgctgatgattgttggagagatctgcaattttgtggcgtatgcgttcgtcgatgcgattttggttacgccgcttggtgcgctctcggttgtgattacgacgattctgtcggcgattttcctcaaggaacggcttagtttcgtggggaaggttggctgtttctgttgcatcattggatccgtgacgattgctatgaatgcgcctgagcagtcctccgtcaaggatattcagggcatgcagcattttgttattcagcctgggtttctggtctatgctggcttgataattattggggctgcttgtacggctctttgggttggtccacgctatggaaagtcgagcatgtttgtttatatcggtatttgcagcatggttggtgggttgagtgttgtggctacccagggcttggggtctgctattcttgctcagattaatggcgaggagcagttcaagcattggttcctctatgtcttatttgtgtttgttattgggacactgctgactgagattatttatctcaatgtacgtcttcactcttctcgtgtctcatggctatgtactaacccagctatacagaaagcgctgaatcttttcaatgccgctctggtcactccgacttactatgtgctattcactagcgctaccattattacttccgccattttgttccagggtttcaagggcacgggaatccagattgcaactgtgatcattgggttcttacaaatttgtgccggtgtggtattgctgcagctatccaagtccgctaaggacgttcctgatgctgctattttcaagggcgatctagatcagattcgggaggttgccgaggtagaagagcccgagtttgagcccaaagcggactccattcgcggtgcggcctctatcattcgtcgcatttcaactgctcgccgcactatggaatcggatgaagcccgccgtttctttcatgataagcatgaagataccctgacagtgccaggcgagaatgagataattgaatgggatggcctacgccggcgcaagactgttattggcgagggaccgactatgtcacgaccaatcactccgcgaacaccctcggtcaaacaacaacatcctccgtggggcatgtcccgattgcccgctgcggagcatgaggacgaccaccgacctaacaccaagcaaagcggtcattcttttatggataacattcgatctcgggcaactagcgtgcttcatcattcccaatggaagcctgtaaatacagaagacgagaaaggttctaacgccaacacccaatcgatgggaatgacagacatggcacaccaaagtggcaatgttgacaccgaataccatggtgccggtatggctggaggtgtggaggctgtgttcaacgcaaaccgtccacgtagcgatacgccgcggtctatatcatgggcagacgaaaagcccgaatcactagcaccggaacctcttgccaccactacccgccgccaattttctttcaacaacatgatgggccgtatgaagaccgacagcgaatcttccgtcaaacccacaccaggttcgcccccccgtggcatcctacgccgaacgcacctggcacccgatctgcgcaaggacgcaactgaggaagaatcactcggcctcgtccacggcgactcacgccgttctcaaccagaggaagagcccctgaacgaaaagctagaccgttggtcgagcgccgagtcagaacttgacgaaccccagcccatattcacaggtcggtcacacggcaactccgtgtctagcaacatgtccaccgccgcattccccgcctatgaggataaccaccaccactactccgagtccaacaacccctactatctcccgcacaaccgacaaactacctcatccccagaacccctctcccatgaagaagagggatggaaacaccattcatcgagggggagcagcagtaggactcgcacacggacaacctcttctgttcatgtgcattctcacgccccaccccccgcccaatcctccttctctacccaccgccatccaaaccccttgccgccactccctgatatcacacccaccaccaccctcgatctcaggcccatcgcaactaattcgtcggcattgagatcagtctcttcggaatcagatatggtaacaaccctctctagcgaaacgggagacctcaacgatcacccccttggctacctcgcgcgccaacagagcggctggcgtcggcatatgtctgaaaacagcagccatgatggcgagacgtatgccacgcgcggaggtagaggaagttcgttcaggtgaatgagaaacttgcaatctttctggcttatatagccatcctggattccagtttatggcgcacatatcctgttttctttccctatagtattttgcatggctatggcgtttattgagagattttgttgatatgtcttttcttttctgttttttaactgatttttgtcctgtggtcgaacctggttttgtcaaaccagtctgtacatgtacggtgattgtgattgtgatcttgtatataatggatgttatgataatggtgcatgatattaatgaaatgagaacctcaagtgtcaagccgagagtagagtactgcataagtcgtatcagcaacggtggcacattagtcaattgaacgagagaaatttcaaagcagacgtttcatattcatgacgatcagatcagattcgatgtgatcatagatcattgggtatcctaagtgcacgtggttggaatgctcataatcccaagccggaaaattgacggaaaatcatggctctatccaaaacgccatatgctatgcaaaaaagaagaaagtcgctaaatgccaaccataaccatgtaaaagaagatcacttcttcggctcctgcgcaccaaacatcccagcaacactccgctgccccttggcggcaacatgcatactagggaaccgggactcggcaagacgacgcccagctttgatactctcgagagccctagtgataaaaggttcaacatcagaaagggtcacttgccggtcttcaacagcatcaggatagtacataccagtccacactgacaaccttcacgcctttccaccccccacgggcaatttcctgctggagcttgcccgccgcaaggcctccccctgcaccagatacatccattccactcccagccccagtattgggctgtccgacaagaacatgcgtcaccgtcttccgggccatgtaaatagaagtcttagccccgttcgacgctagtaaatgtttgagtttgtactccgaaattcgaggaagtgtggagccattgatgaataccgtaacaccagcgaagatacgcgaagtcgactttaaatcaagactggcgctagagtgggactcgggttgggggttgccatctatttgagattctctctttttcatttcccttgcatctcgagctggagtcaacccccggttccctccaacagtcctaagtctcttcgtctccacatcggtatgctgctcgggctcatccacaaccttcctcttgctaacacccataaacgaccggatgtcccgaacaccgagttcgttccgctttgccacatccccagctaccatagcccactcaccggaagcagggactttgggcggcgagtgcggcgcgcattgcccatcgaacaccccgggtacaagcgttgactctcgtgtttctgtattccgaaggcccgatcccgatccccttccccgtcctggaagacaatccccactattatactgcctggtcaatttcgccgaacgcgcatctcgccatgatgttgaaccgaggaaaccgccgccgtcggctgcatgctggtgacccgttgaggctgactgccaggagtcgaaatagaggtggttttggggtcctgggggttgtggttttgcggctcgttctgatcggtcgctggtcatagttggatcttgcaattttgcgggtttgtggcgagggtctctattcgaattttgagggtgacgttggccgggatgaggtgttctgggatgtcgttatgcttgagttgaaatttggcgagaagtcgccgtggcgtcaaacggaaagaaccatggttcgcatgttttgattttgctgttttgggatagatagggtagatttagtcacgtggtgtgaggtatgcgagtacaatgagccatatacaatttatagactctatttgacggtttccttggagatacacactggcactaagctgaagcttgagaacaagtctcaaggatgaagtaagataaccgaagctgccatgaagaaagcctaagtatctaatagctatgaatgcccccgatgatctatagcgtcaagtcgtaacggtcaagttcaatagctcaataagcgaagcaaggcccagcagactacaatttacaattacatctacaagctgtaaggcgagagaagtcggaaaaaacaatccatttagaccggacaaaaccaacgttgtatgtcgctaaaggcatgcagacccagagttcataaccgttcattaccatgataatcatctctctagtagagtggcagtggcagaagcagaagcaacagcagcgcagagagtagagaggggagtaaaaccaatgccaatgccatgccacaaagaatacccttttcaaaccccagaacacgcatcaatgataaaaagaaaagaaaacaagagaaaaacaactcgttaatgaagatggctcgtcgtggtcaagtcatcacacaaagaaaattcgttcataagagattcgtcacatcgtagtcatcgaggtttgcgatcactatccaagtcttcaacaagtggcaagtcttttaaccacggaagtatcaagaaatgcgtcgctaatgttgtaccgtgaacagatcttgcgcctaattcttcccctctcccccacacaagttagatattctcaaaaaaaagccaaggtttcttcaacctaaaacataacgcaaagagacaaatgagcttcgtttcgtttcgacaccgccgggtctaccgatatccacgtattcgtagtgagacacagacaagaccgcggcgcgccatgcgggttgtgcatgcgtagtctatcgtgaaaaacaaactccgaccgagaaattaaccatcagtaaaaaaaaaaaaaaagaataatccagcaagagccaaacaaaacccgaagagaaccggaacaaaaaaccacaagctcgaagctagctagaagctacaattgaattgcacgccctcagcggtgacgagccatgaccccactaggcttcatgggctgaagaataggcgggccaccgaccggacctccgagggtagaatcggtgatggtcttgcggcgctttgaggtctcatactcggcagtactctcggggcggatatcgtcgtcctcgcgcatgcgcttgctgcccgcactcagcgaaccattgccagatgcgtagaccggagccgtggtcgaggccatggagtaggggtccgacgcaccggtggctggggtaccgcgagtatcgctgacagcgttgtacagggtagtggcggcgggacgaggaggggtgttgtagcccgaagcccagtgaggaggggggccggctcccgtgcgcggagtcatgcggccggagccgttctgctggctcggggagctggtcatctccggggtgagctgggagtgctcaccggtcagggagctgacggaggggtttgtggtgtaggtgtaggagctgcggttggagttgtagccggcgttgggatcttgcatgtactcctggtcatgctcggcgacagtctcaccgggtccattgctctggctgtagcggtttgtgtcgcgctcagaggtttcgggctctgaggcgccgggccgtgggtttggtggcgccatctcgcttttcatgtacccgccgggcaggggttggccgtagttggacatccctgattgagtcaatggggtgtgcggcgcgtattgggcatgagtttgtggtgccgcggagtagtagggcttggagctgtcgtagccttggctttggtaagctggcaagccttgcatgttgttgcccggtggggtggttgcgggggtggttggcattgagcgctggttgctcagcgcggtgtcgatggacaggggttgtgtatgtggcacttgtccgccccattcgtatgaaccttgatggctgacgcccatcagactggatgcgctagctggcggtgtggggaatgtgttggcacgttcgagatttggtctggagccgggctggccgtttattggaccttgggacatatgagaagacatgggggtctgcagggaggggtggtgatggtgaatcggggtttgctgagatccagatggcgtacgctggggacccggaggtggaccttccagacgtcgctgctgggactcttgcactaccatatttgtccgagtctggttagccgggtggtatagaagaccaccaatattatgcacgaagagtgggtataggagatcagtgatcttctccttgttggcaaattctagagcacgctcaaatgggatcctgaagaataaaagtcagccgatgttgcgcatgctctccggggtcaaaatacataccagacacctttcaaatgcatcggtccgattttcacaacatgacggagcttctcgcttttgaggattccatcacgtcgaccacgggtcatgccagctacatttagcagctttgtgccattgaccatgtggttatctgcgggagaaacgttagcaaacatatcctcggttgaccttccagcagaatcaacttaccctcgcgtcgagccacgcacactccctttgcttcgacctggtagcagaggcttccctcatcttcccataatgttgctgtcactcgcggcttcgctcccggaggagcaacttgcccagtaccatcaaagacaaacccttgtagcggagcaccagtagtgtttgcatagccactcggaggtgccacggggtgattgctcacttggtaacgatcagaataatcatccatcccactctggctttggagcttaccaggtaagggcagcaactggctctgcatctggccacccatcgaggttggcgggtgtcccgcgggtgaagaaacgcccggggcgtacccatattgggggtaagcagccggggcgtaagaagacgcgggctgcatcaccgggggttgcccgtggtactgatagtgggacatagcccctgcggttgcgccttgaggagcgtaggactgagcagaggacatgtgcgagtggacatccatgtacggctgggtctggttcatgctgccgagggaagttgggctgggatagtacccttcgttgaccgaatgtgggagactgtattcggttgcggatgaatctaatgaaagccggccctggttcccagacaggtccgcagaggacgggctcctgggttcgttggtaggcacagaggcaccagacagactcgtgcgagcgctagaggtggtggaattggtcgcggacgaatcgtgataggcggtccgagagaggccctgggtggctgttggcaggctgagagcggggagtttgtcgccgggcaataacggtcgttccgccgcgtggtggttgtaccaggggatgtcagcaggaccgcgggtatggacctgcgagatcgatggcagctccagcttttcggttgcacggataaacggtttagaaaaatggagggatgaagcgagcagcggacgtcgtaaatgtcgtccggcgtgctatcaatataggccgcagaatcgttggaagaccacagagcttgcgaacgtcgcacgaaggggaaaataaaaatagtaaataataaagagaaagagttgcaaacgcaatattcaacgggctttcaggatcaaacgtcccaaaaatagagaatttttatagcaagtgatgcaagatgcaggcaatgcacgtccaatattcgtagtgaagcttcgtagtaagtcgtaaaccttttgtcaagactcgggaagcctagacagaagcgcaataaggactttttcttgaaaagcagaattcagcgagaagcacaatggtcatcagaatcattaacaatcatcaatcgaacacatcaaagttgggaagcttcagtggaactagacagaaaggcgtaagtttggaggtcgtttcaaggtcatgcagggaatcatgtcatagaagaagaaactctcaaattggagcgcattggatgataaaataaggccaaagccggataaaggtagggggagggagagttcaaagtcttagacagtcgagggatgggggggttgagaagagaagaagtgcgttcgacgtacagaaaggtggaggctggggtggtgcagcaaacgcatccctatgcaggctggatagatggcgtttgaggaaaaagaaaaaaaagtaaaaacaaaacaggccaaacagatatatagcaagtaaaaatagaaatcaagggcaaaagggcgggcaatgggggaaaatgcaagcaggaaatcgtacagtgaaacttagcccagcggttaagagaggggaaaagaggtgaagcaaaatgacgctgagccgcagcgggaaagtcgatcagtggaggataagaagaagctgactaaggcaggcccaagagaagaaagagaagaatgttgtctgcagaaatcccggcttgccccgtcttttgagggagagacgaagaagagaaaaacggaaagcgaggagagagagaggccatcgaatcaatcacagtggacccggtagagagagagagagagaggactaccagaaccgtgcgtttagatcatcctctagactcgatatctgctgtttttctttttcttttctttcttttctttcttttcgcttttctctttttctctttttttcgtgattatccgattttcctttttggaattattccattattttcgacgccaccaagtaaggaccgtgatcagcaagcgttaagcggcgaggtcaatcattcccattctgaacggaccagtattaacgagcatttcccgattcggaccagacctagactgcagggacaagtccaagagaaatcctcccagaggatcctggtctgtgtgacaggcagataaatcaacacgatcggccgggataggcccgctggatctgggagttgattcccttagtggagtcaccgatcagattcaattaatttattgcttttcttgagagggttactcgagactctactattgctggggcggactgcaggatagaacaatagacggacgagctaaccatcccctctacacaccacccaaaaagccctcaaacggttcctatcatccaataaataacacctcagaaataccacctgagacggttcgtctccacgcgcgcgggtcccacccagtgaaccatgggcggtcgaccggggagtaggaacggggggaatacatcccacggtttaggctgaggttaatggctgaaaccacggttgagataccaccgtccacttcatcctacgacatctggtagtcgcacatcggtactatatcgtgcataccgatgatccaaattgaaatctcgtcccgactgctctttcatcgtgcaagacatctgtcagccgctgcggagaggggaaagtaaaaaaaaagaaagaaagacccggtaatgcgcggcggctgcaccgtcgattgcggattgcactctcccgcttctggagccagcgcttgcaccatttcccctctatttggggtacagatgatacaggctaatacctgcaaggtccatcttaaagaaacggttaaattccgtcccacaaaacccttcaccggacatcgcccgggcctcccctctcggatatgtcactgttagaggtggtcgtcgatcgccccgggtcaagtccggtcaaaggccatgtgtggttgtagccgatttggcccactacaatcctattgcaatccctaagccaagcacaatataataccaaggccttggttgtgttcttctttttatggttcgggacgatctaggcgttaagacgggccgtgagtaacagtggagagacaaagaggaaagaagcacgtcacaccccccgggatgcagaggggagaatcagtggctcagaaggaaccacgaaacacgggtggcttgaagtcaatcaagggtctgttctctcttcccaatccctgccaagtaccacgaagaccagtcagaggctaggcgtttaccgaaactgcaggcgatccccggccggttgaagagaaatgggaaatgggaaattagaaatagaggtcaaaggcaaatagaaaatagaaaatagataatagataatagaacaaaaaagaatcggattgagtccagaatctgtccaaccacccaatttcagcccgaattgaaataggcccttcacacgtagcatcacaatgtcaactgagagacctcgtgatgatgtatccgactctttcttttcgcctccaaggttatcgggggatcgtattgaggctggaatgattcatcagcctatctatgtacacatgaatgattatgttcctgatagtatagccggataatagttctaggcaaaataatagcaaataacatatttgttttgatcgaatttatttttccttacatttttcccccaacaaaaaccgaaaagcctagagccagatcccagtaaggggggaagatcagagagacgctgaacatcaagccaactcgaccccagttcaccgctaatttcgtccagagaggccaaagtccccttgcgttttggcctttttattttcatttattacttggatggtacttattctccactaataggaactaatagactaaactattcacggacttgatttctaacctgatagtctcggctctgggttgacagatgtcaattcccacgctttcccaaaaaaaaaaaataagaaaaaaataaataaaaaaatgacagctagggattcgcccggttgctattttctcagtcctaccctaatatgcattgaccactgtacatggacctagattcaatggttaatttctgagatttcggggagatcatgatcggaatatgatttccaaatatcaaattattttgtactttgcattctctagcgggttctgcaggtggcgccgatgacattgtcccgccacacagacccttgagaggtcggtgaacatggggccgggaaaatacgggcctaactctagaccaggttacggagtagatatacttgcttggatatatttcaaggccaactagtctcatgctagaacttccaaacgggtaggaataccgattttcttgcagacgttatgacatacacggaagcaggtactacccaccctcgcacactaggcccagagagctccgggaaatttacagaaagagaaagtgagaggggccagtactgacagatccctgcactgcagctcgctatcgacggcccgatacccgctgcacatacagcatacagtagtttaggggggcagcatgggggagggatccgcctgaatcgacacatatctttactggaaaaggaaatagccttccgtgccggaggatttgggggctgaatgctcaatggtattgaaaggaggctagagtggaccactgattcatgactttgcttctttgcttagcccttgtgttattattctgtcagtctctccccgacaggaatggaaaaaatggagagccgaattaatcaaaatcagctcaaatgagatccactatacggagtatacggagtacccacagccattggaacggcaactccgcaattcggctgtgatgcatcgtatgggaccgttgagccgaaaatgtaaggagatgatcagttcttatgataggtacacttagtagtatttgagatataatgtcaatcctttacggagtaccctagagagtagacagcaaatactcgactatcaaatatattccatgtgtccattcttttccactgatcgtccctccggggttttccgactatcaacactggtggatctctagggttagaggtcacatacggagactagagaatccttccaacattattagcatttatccataaactctcccatagctagatcctccacttcactgtttacgccgtcaatctcgcgtcgatcgacgggttcgtccgtaccttgcagcgagttaccctgcagactcttgtccgtgcagatttcaggcttttttcgtgaaaacggaccacagacttcgaatttaaatattcttttttttctacaatgtgcactattatcatgtttatatacggggctttttggttcctcttctgcccttccggtctataatatttcaggggctgccatgttttcccatgctatactccgtacctcacacatcaaaagaggcagaatatgcccgaagccgtctgggcagacgttcatgcccgataaggccatcagactgatgatcgcggacacacacaatgggtacaaggcctttgagaggcatgtgtggtacagcataattacggagtacgattgtatagcgggagactcggacacgaggaagatttgaccgagagccgatgacttacagggatgttccctgcagactattgatgtgttgtacaggacggggcaaatgaaaaggcgaatcgaccgagatagcctccgtatactccgtagccccgtagccccgtctgctataggtccacggtaaccagaggtacttgcccaagtaggtataggcgtggacatgatagtgaggtacatgtaccctgaaacaatatttgaattgtgactctgcttttcatgtgactggagtaatttcctggagccagaacgccacccacttccctcgcgcgaataacaatgcaccacgaagccaggatctggcgtgatggaactaggctggggccgtgcaaccttggatttaacctcgcattgcattgtcccgtggagccaagagatcgactgcacgttcatcttgcctttgcactctagcgcttcttgtgtcgcaagagaggggggaaggaggagagataggtctaacaagaatcgactagaaaaccgccgtggattagggattttgtacgtcggaccatttagtgatcataaccccctgagtggaatcgtccaatccagaagaaaatccaaaggtcttgaataattcaaccgccgtaaccgttgacaagcgccggtattttcgagtcatttattcgcttttttttttctcccgtgaccatagtggtagtccagaacaatatcacctggaatccctcatatctccgaaatagccaggatggctcgggccaaatgtgtaacgagactaaaaccccatccaagccagcggcgccaatgattggcttcacgtaccagcagcccgccgatcgatgacccgacccaacaatgactggctacggcaataaccacgtaggcagggctagatcgtgtggattcaccgccagttgccccccttgcgtgcagacgtggcacagagcattatctcatagtccgtacggagtagctccatctggtatgcagtgacccgctgctgtggaggcctaatgttggatgtatgtcgaccgttgtctgctttgtgtatggcttattatcccctatagagtacgaagtacgccgtgtaggtgagacaaatatcaaaaattcaagatgtgaatttttttccaaacgggaaatatcctcaacaacgccgatatcgggctattttgggccgatcggcgcaacgtcagagggcagataaggaaacattaaaacaagtgaacttcgatgtacgacatagtcaaaatatgccactcttgtgagatatgaacttgtttactatgttgtacaaaatgtacaacagcacttagattcacctgttcagaaagggagtcttaccagcttctgcactaccacatctcagccctttgtacatgtcaaaggagacataagcataattatagatcgtgaaccattctacacagtccatgtgatactagcactatattcaaaataagcaattcttccctaggttgctgtgtcatccctgataatgacaatgattaggcaataatcacgctaagcctagaacagggagaccccggactagaacaccaggcctaatcccaatagacagataggcaagagccagagcaaaaatccaaataagcccaaaagaggaatgaaaagaccgctcaccgtctctttgctgtctcagctcacattttatagtatgtactgtgcatctgacaccaaaacacgcgccgtccacgcttctatctccccggggaggcgtcgctagtcgatcgaagaatgcaaataccatgcagcgtgcagcccaagctggaagtatcatgtacgatgaagcagagccagagtgacaagctagctgccaagtgccagcgcaggcggctaaaagcaagtgcaagtgtaagccacccacggactgggttgctgtgcatgaaatgatgtacatagttaatcgagcctagcctaactactataaatgggtgggtgtgaatcatgtccagatcggaggttggcgcgcgtgggggtttccacattctcgaagcatgtctgccattgatattgtgcatggagcgcatgagggtggtgtgggtggatgttgcatatcgtgtcttgggtgtgtctgagatttgttgaatttgtttcgtattttgcttttttttttctttttggaggaaagggaaatttgctctggttggtacgggttgaggaatatctgggggggggtggggatgaattgggcatggggttggcagttcgcttgcaggaaacttctaaggttcttacctgggtgttcagacctcacgacttcgtagaggtacgtattcaccgctggttgaggacctgcatcgactgcaagtctctcgtgtctgtcaagggatagttcgtgtttgtgggagctggtattggcggtgggaggttggtatatcccttgattggaaattggattgttgctgcttgtattcgtagaccgattgtttcccgtgggaaaaatgcgggaataagtttgaaagatctggtctcgaccttttgctgggagggttggtagaagtcttgttctatgcttatgcagcaccgatctcgatctgataggggttgttgcgatgataatgcaatcgcttacgcacagcggatcaatgctgatagtgtcggtgcgtcgactcgaggggacgggcatttctgcagtgttctgtgctatgtactccgtagacctgaacgcgcttctagaaggcgtggttggtgcagtatgctgtcttccgttgttcatgtagggatgctacggttcctgctgatagatcgccgggatcatatctgtattgcctcaatacgatatataagtcaagctgtgcgcggttgagccttaaacttcgatcaaaaggaatgatcagatatcggtattgggtcccgtagctctttcttttttttttccttgctctagaagacatagaagatcttcaacataacccatagaagacatcataaaagacaatatagaagatgacttgaacgtgtcaacaacaatggacactacggagtagacgtggcctatatttgcccggaagacgccattcattagccgatggcaatccgtaattttattcgatatgaaatgtagaagaaaagccgaatcatacattataccttatagcgtcgggtcaatggatgtttagacatgattcgagggatatgtcttgagatgtgtgtccccaatatatatcccctcctcaaggtagaactacgagtggcatacattaaaatggaaaaaatctccaacaaaagacatatacattcactacagaagaaaggagcattatttgaacgaaaaaagagtgtttgtccattgaagtaactctaaagctaacaatatcccgacaaagttctatacccgacccaaccatattcatcatgttttttttacatgcatatctcatgaaacgcggatagcataatcacacatcagggctggtaaattcatcgcttaccagcctgagaaaaaatctgttgccaaatgtcgatccattgctgatgcttatatgacaacggacggtgggggttgcggaaagtgatcgaaagaatctcgcgcaggcggctattcaggatcctcaaagctagcatagacttccaatctcgcacagcgaatcggatacggtttgcgtcaatggagacgacaccagaatacatctgtttggcggtggttagcttattgcctaagaaatggggcaaggaaacgcgaagaaggattgctgtcgtcgtaccttgaactcggcatcaccacacagtaaagctatagcaaaatcgtccactgcactggtatcgtgcgcgttgaggttgcgagcacgtgccatgatgctatagtatgacagccatttgacagacgaatccgccctcttgttgacagaaacagcgggcagtgtgactgtctggttgttgccaacgttgcgccagcccttgccttcgcgcgtcagaagcttagggtagaaactccaggcgatgaccgaattgatcacagtatcattgttgctgttgatgtcgaaatcttcagggatgatgaagaattggcgatttcggctgttggaacgtgcactttgggtagggttggttagcaattgttaggttgaaatgtgacgtttggacaaaagaatctcttaccggttgagggccgctttctgtgatgcatctagggtcagaagacctgcatcggcaattgacactaccaattgcatcttgatatcctctatggccagtaatgtctgcgcgctgaggaagttctttcggcagaaagaatattcgttggaccccggtgtgcttcttgtgcgcctccaactacaataggcgttgtatacggtcaagagatccgagtcacctagtatttgttagttctcaactgcgggagagcgatatattgggacagacctcttcggaaagatgcccgagcaccatcacgttgtgagttagatccgattgtgttgacgaatggcgacttggaagagaggatagcagcaatgctgacagtcgcatccaagcaccggaaaaaggctccatgaatgatcattttgccgaggaagacatccagcggcaacttggcgagttgtgttccgagagaggttaaactctcgttgctcgtcagggccttgacttccttcagtgaatcaatggcgcggcgaatgtttttagacgacggcgggtcaagagcttcgaggagtgtctgttccacttctcccagtttgcagatcttgacacgaagcactaaatcctgcaaagaaaggcgcagcaattcgggggtttgctgttcagaaagcaacttttcgtggcggtgtttagtaaacaggtggaagcagataccgttctggacacgtccagcacggccgcgacgctgcttagcgttcgcacgcgagatgaatgactcaacaaggcgggataattgacgtctctcatcgaagcgcatgatcttctcctttcctgcgtcgaccacagccgtaatatctgggatggtgatacctgtttccgcaatgttcgtcgcaataacaatttttcttgtgccttccgggggtacgttgaaggccttttcttggtcttcactggcaatcgaagagtgaagtgtatggacgatccaacccctctggaacatgggctcagacaggatctcatcgttcaggcgacggatttctgccagtccaggcatgaagatcaagatcgccttgctgtagtgagtcatctctggggccgtagcaatcttcagaagtaacctcttgattaggtcatagtctagtctgtattcatcgatgttgataacagtctccttggtttgtctagaatacccatcaagactggcttggagacctcctgtggtgtcggcatctgtgggtgggtcatccatatcatcgtcgaggactgtgtgctgggcatcctccgacaaacggtagttggtcatctcgaccgcatcctccaggtacttcatctccacggggaatgttcgccctggaatgttcagaactggcaccccaccgagatagttcgaaaaacgttgcgcatcaagggtggctgacatgaggatgagttttaggtcaggccgcttctgcatgagtcgtcggagcacgatcagaaggaagtcactgtcgatagtgcgctcgtgaacttcgtcaagaaccacatgagtgatgtcttggaagtcatcgggccgttcgagcattcgtacaaccacgcccgtggttctataaaccattagttgagcgaccacaaatgaaaaaacgggagaaaagtgagaacttacgcataaatcaatggcgtggattgagtaaacttgctttccaaccgcaccgcaaatccaatgagagatctattcgtgcccacgtcgttcttgctctctccaagctcctcgctgacacgtcgagcaagcgagattgcagagatacggcggggctcagtcacatagatcttgcatggtcggccttggatcatctcatgctcgagaatgaatgacggaatctgtgtactctttccactacctgtttcactgcaaatgatcatagctcggtgatcgtcgagcgtactcaggatctcatctttaaaaccccagattgggaggttcattctaccttgcatcatgcggtgataggacggtgttgacgatttagcaatccatgcttctttcaagcggtcatcgatacccgcgtaattgtcacgcgtaggtcccttcatcggggtgcccggcttgctaccaacaccgtttctcttccggaagttgtcagatagaacgacatcatcttcgaaggtgccttggttctcttgaatcaaacgcttcaactctttgacggtggttttgtcaacttcatcttgttggatcttctgcagtgttgcaaactcagtccagagttctctccaaactgccggcaaccgcaagtaggccttgccctccttggaattttgggggaacaagatgaacaaagccagagtcgacacgtacccctccgcctgctgcgcatttggtgttgcaagggcatccattgacacaaaagtagccaaggcattcgacttatgtgtaatcgattccactgctagcgggaatggagcttcctggggcttcgaccatcgcacctcgagagcttttctgttcgaatgacttgaagaggagaaatcttggtagacaatcacgcatgttgaatctctcgatttgcaagtctcttccaagactcgccgtgggctcaggcctgtcgatttcccaaagtcgcggagtgtgattgaggtttgggtctgtggagcaggaatacctaaaatcgagcctgaatcctcagcttcgccttggaacaaatctccaagggcatcctccattccgtcaatcgcaaggagggccggctctagctcttcgttaatctcgggctttggctgatcttctgcatcggtcgaagacttttttttcaccgggcggcgagcaaatgaagcatccttcctgagctcgtcaagcttttgctcccatatgtactctgcttctcggcgttcgaaaagcacatcccgttcgatcttggcaatcttccgctgcactttagacgtttcagggtcatctgataaattgctagcaccgacgcgacccttctttccctttccggagcgatcgaaaagatctgggtccaagctgtaaagtcgagtctgcagctccaaccattcgggaaccatgatatctgggtcgacggagctatccgagtcgtacgaaataggaggagcaacctttgctgccttccagtcagcctttttgtttcctggcttgcttcgattttgggatgaaacaggagtcgaagtccctgaagctttcgattctgttaagagttagcataatgttccaatgaaaaccttgaacctgggggtattacctgtcatccatgaggtgacactatccgtgtctttcagttgacgagtatttatctgtgtgtaagacggcaattcatttttatcactgtgcgtagccaaccattcaattgcttcatcaaggttccacacaacatcccgaccggcactgtttgagttgccagcaaagtattgcaaaacatgcttcagtgcgtcctcgacacggttttctggaaagttgagtttgagcagtgtttccctcaaggtccaaagcttgttgtataaatcgtcctcagagccagcctgttttggacttgtgatccgtccactagctatgagatagtcatgctcttcggtaccggctagttcgagaatactgtcttgaatatctgtcggtaaccactctagaaggctcaatgatactgattgctgtcggaaaacgcggcgttcgttttctagcttagtggcctggcgcgctgcgtcatttttacacttcgcagcatatttatcaaccaaaatctgaagctctgcttcttcaagatgcttttccagctcctccggggtgtagtcttgtaacgaggaggttttttgtggtgcggcgacatctgcaatccgtatggcattgcgttcaggttgcagctcgatttctggagtggcttttgattcttcggtggctggagaaggtgtggatgttgcctctggcttaggctttgagggcatggagaccgttgcgaagcctcgagccgggttggaggcgggcttcttctttttcttgctgctcggcggcattatgtctgaattatcagcgggcctagcggagatgtcttcgaagcacgctgaaagtcagcggccaaagaccaatgaatttggcctgtgtaatattgtggactaaggtgcacaatattcccaaaaaagggcgttgaaatgtgtaaagaacgaagagtcggccatgattgtttaatggcgggatgtgatccagctccccacacaaaactctttatgacagcattcctagcccacttcaccaacttcaacactctctgaaccacccccttctctctcgattcccccgtattgaccgccgatcatggatggaattccatgggatcaggtcaaggccggggatctggatgccttgcaggtcgttctcctctcgagttcgacctcgcgcaggctccgggccctacaagaactccgcgacaagaatggtagcgtgttaatccaagcctcatgacaagcagattgactaactattcattttatagggtctgaaatatcaccagaaatcaatcacgatatactagacttgctcttccgtacctatcctctctatgtcgatcgatcctcccgacaggctgtccaacaatgcctccgctctctcctccgcggccccaatgcgaccgaagagttaaaattccttgcgcaaaaattgcaaatcgaggcatctagaccaggtttggcttcctcatttgcatttgttctgttggaatggtgctgtattctgttgcagcaggccagcgaggaccagaacacaccgttggccactgtgctagacctgattgcggttgatgccaaggccctggagaattgtctttctcacaatcctaagcctgcgttaaagcagtcagctcttcgagtgacacgacgtgctttgcgcgctgtattttcgtctaaggcatggggtgctgatgcagtgcggcagtctgtcagccgactgaccacggactctaccgcagcgtacagaaatgtgcctcttctcggtgtcgtatgtggagtctgtgcgcgactagcagacaagaagccaattcttgaagagtcgaaaaaagagattttagctttctacatcaaggaagtcgtgagctcaaaatctgttgtgcccgcacatgtcgccaatggcatgtctgacttctttacttccttcgtaacatatgaagatgttgccactgaattggtacctcccatggaaaagtccatactacgagcaccggaggtggttctcaacggcgtgattcctcctctctgtgtcgctctgccagaagatattgatatctcggaattggtgcaaacacgcctttccaagcatcttttaactagcatgaagtcaaataacccatcaatccgccaaggggcatctgactcttttgcatccttgctctctcgatgcagaaccggtcccttggtcttaaagatcaccagtgaaatcattggtcctctgaaaacgcagaagattactactcctgagcaccgcatggcttacgcccaggcaattggggctatttcgccttcggtggatgtctcaaaagaggttgttcaaggattctgccctgttttttcacgggagtcgaacgaagctgccctggaagaggagatcaattcctttagcaaacaccttacttaccttgttcaatctaagctcaaggttagcgatgatgttatcagcactatcgtcaagggtgtatcagataagcgaattcctttccgaaagatctggcaagcaagtgtgggagaagtcctatggaagtctgatctcgaggttttgaagacccctgaaattgaaccactcgtcaccaagttcctcgctaaaatgaaggatttgtttggtgaggtcgcctccaacccgcttccctcggcccaaagcggtgctttgtcttccgcttatctctttctggctctgttccaccgattgtccgatattcaagagtctgccagctccgcttgggaggaaaacgtaactcaatcgatgaaattgagccccaagccttctttcctcctcaacccgaaggcatactcaaagttgagttccaaggaagaggtccagtggcttgtcagggctctggctgctgtggcctccgggtctaagtttgctagctctgaagatgcgtccaaaacagcttgggctcagacctttatctacgcgatcaccgggcctgctattccctcaaatattcgcgagaactccgcggaaacattatcccgggtctatcagacggatgtggcctcttttgggcgcaccgtcctaaatgcactgtgggcatggatcttttcattccgaaccgcagagaaggaatcagcagccgtttctgctggaccagagagcgaacgcctgcttcatattgtcttgaaggctctctgcccaaccaaggctgtcatagaaagctccggaatttcttcttctgatttggaagtcttgctcattgaaatgctgattctaagtcggcctgagttgattccgaatacctcctggattgatttgtgcttgaggaccggcacggaccctggaaatctcgtgcgcgcacaccctgatgcttgcatcgagcagttagttcacgtgaacgcagaccccctgcagtcagcggtaccgggtgttaacctcgctgtctggaccgctggggctgaattggcatttgttgcccccgatgcaatgatcccgcgtttggtcgatcaaattaaatatgatctggacggcacccgcctatctaagttcactgccactgatgccgccatttcacgcacccccgaaggaaccgcttttatcgatgtgctcagcagtaagtcgaagcagcctgcctttgataagaacactaaggactatgacactctgaagtgggaagaagaacttcgtgcgcaattagccgaaaagaagggccaaagccaaaagaaactcacacctgaggaaaattccaaggtcaaggcccagcttgccaaggaggccaagattcgtcaagatgttttggaagaagtcaagcggatcgaaagaggagcgggcattatccgaggtctcgcaacgggtccagccaacgacgtcgaggggtggatcaacgctgcagtaagttctttgctgtcgcttgcacaggctggtgcgggtttatttgtcggtgatgttgtctcccgagcattcatcacttgcgccgatgaggtgtccacccgcctcggtcctctgcgttctttcgttggcattgcaactctgcgagccatcggtaataccaaccttccctctgacatggaattggaacccctcggtgaactcgtgaccagaattctctaccgattacgttttgcttctgagcagcgtcctttcgataccacgtctctcgcctacgtgcttccgcttatctctctgattttgtcccagaatggcattgaagaagcgaagggagaagaagaaggcacacaagttctccttgctcttgagttcctgtcagctcactctggctcttgtgagttttaccccacgctaaactagtatgaaaccaagtgctaacgctgttatagtcaccgacgcccgtcttcctcgcgttgaggttctagctcagcttctctccgccatgcaaaaatacacccagcactacaagctggtcaaggataccttattcgacttctgccgatgcatctcgccgaatatcagcagcgaagagctggatacgctcttgcagggaacaattgtcgctgatgcctctgtccgaacaactgtgcttcaggtcattgaggccgagattgatttgactgacctcgatttttcagagcacatctggcttgcctgccacgacctggtggaggagaacgccgagattgccgacacaatttgggaagacaatgcgctagaggtggatgacacctcgttcagcaagatcatgaaatacttggactccaaggactatcagcttagaggcgctgccgctcgcgctttggcacatgccattgagtttgataagagcaaatttgcgggcattctttccgaactgcaatccaaatacgtggaagaaataaaacctaaagcacccgaaaaggacgcttatggaatgcccaagaaagtagacaatgcagaccactgggaggctcgcagtggtattgcgctggctttcaatgctatgaccaatggattcgatggtgacgagagtgtctcatttttgcgattcctgattgagaagggtcccttgctagatggaaactcccgggtccgtggccagatgacagagagtggtaaatctattatcattttgcgaggagagtcaaaggttgaggagatgatgaatttgctccaaacaaccctggaaacctcggataaagacacgaagacctctgacctgctgaacgaggctgtcatcgtcttatatggatctgtggccacacatctcaaggcggatgatcctcgcttgcagacagttatcagtgaactgcttgtggccctcgataccccttcggagtctgtgcagcacgccgtgtctgagtgtctgccccctttgatcagatcgtctgattccaagacggcagagtatgtggaaaacctaatctaccggctcttcaatgcccctgactatcctcgccaacgcggtgctgcttacggtcttgctgcagtcgtgtgtggcaggggtatcgcaaccttgcgggagtaccgaatcatgacccagctcaaggaagccgccgagaacaaaagagaaaaggatcaccgacgaggcgccttgttagcttatgagcttttcgccctagttctagggcggacatttgagccttatgtgatccatctcgtaccccagcttctgggaggatttggtgataccagcattagcgtccgcgatacttgtttggaggcttcaagggcttgcttccagaatctcagctcttacggtgttaaggagattcttcctaccctgctcgacggcttggatgatacgcaatggcgtagtcagaagggtgcttgcgatctacttggagccatggcctacctggacccacaacaacttgcagctagtttacctgatatcattccccctttgacaattgtgctcaatgacacccacaaggaagtccgtagcgcagcgaatcgcagtcttcagcgcttcggcgaggttatcagcaaccccgaagtaaagagcttggttggcgtgcttctgaaggctttgagcgatccaacgaagcacacagatgaggcgctagattccttgatcaaggtttcttttgcgcactatctcgatgcaccctccctggcccttgttgtgcgcattctcgagcgtggtcttagtgaccgatctaacactaagcgaaagtcagcacagattattggtagcttggcccatctcacagagcgcaaggatcttatctcacacttgcctatcattgtggctggtctcaacttggccattgtcgatccagttcccacaacccgtgctactgcttccaaggcccttggttcactcatcgagaaactcggagaagacgctctgccagatctcattcctaaccttatggctactctcaaatccgatactggtgctggtgacagactcgggtctgctcaagctctttcggaggtccttgcaggcctcggtacgaccaggctcgaggagacattgccaactattctccaaaacgtttccagtgccaagcctgctgtccgtgaaggcttcatgactctcttcatcttcttgcctgcttgcttcggtaacagcttcgccaactacctcagcaagatcatcccccctattcttgctggtctggctgacgatattgaggctatccgcgagaccgctctccgggccggtcgtctgcttgtcaagaacttcgctcacaaggccatcgatctcttgcttcccgagctggagcgtggtcttgcggacgacagctaccgcatccgtttgagttccgtcgagctcgtcggcgatctgctcttcagtcttaccggtatctctggcaagatcgagggtgatgaagaagaggaggaagccactcaagctggccaatccttgttagaggttctcggagccgagcgcagagacaaggttctctcggccctgtacatctgtcgctgtgatacctcaggccaggtcaagagtgcggccctgggtgtctggaaagcactcgtcgcctccccgagaacgctcaaggacatggttcctaccctgtctcagctcatcattcgccgcctcgggtccagcaacatggagcaaaaagtcattgccagcaacgcccttggagaccttatcaagaaggctggagagtctgttctcaacactttgctgcccttgcttcaagatggtcttcagtcttcgcctgatgtggaggtcaaacaaggtatctgtatcgctctccgcgagcttatcaatgccgcttcccccgatgcgctggaggactttgaggatattctcatcgccaccgtgcgcgtagctctggtcgacaacgacgatgatgtgcgagaagctgctgctgaggccttcgattcactgcagcaggtcatgggcaaacgggtcgtggaccaggtcctgccttaccttcttcatttgttaagaaacgacgaggaggctgagcaggcgttgtcggcactgttgacgcttctcacggagcagactcgcgccaatattattcttcccaacctcatccccacattgctcacgccgccaattactgctttcaacgccagggccttagcatctctagccgaagttgctggctctgccatgacaaggagactgccagcaatcctcatctcccttatggacggtatcatcgacactaccgacgaggagcttcgaacagaactcagcgccgcctttgacaccgtcctagtgtctgtagacgagtatgatggcctgagtgccgccatgaatgtaatggtcactcttgtcaaacacgacgatcaccgtcgacgtgctgctgcggcgctccatctgaccaagttcttcacggaagccgagcttgatttctcgaggtactaccaggacttgatccgcgccttgttgatttcgtttgacgacccagacaaggatgtcgtcaagtctgcatggactgccctcaccggtctcatgtctcacatgcgcaaggaagagatggagagcttggctattcccacccgccagattctgcgacaggtgggtgtggctggcgcggacttgcccggcttcagtctgcccaagggcatcatggctatcttgccgattttcttgcaaggtcttctcaacggtactaccgatcagcgtacccaatcggctcttgcaatgtcggatattattgaccggactcgtgccgagtcattgaagcctttcgtgactcagatcaccggtccgctcattcgtgttgtgtcagaacgttcggtcgatatcaagtgtaagtcatgcaaagcctttatgtggtgtctgtttactgattgattctgccaggcgccatcttctatactcttaacaagcttttggagaagatcccgttggctgtcaaaccgttcttacctcagctccagcgtacattcgctcgtggtctggccgacacatcaagcgagactctgcgcaaccgggctgccaagggtcttggtatcttgattacgctcacccccagaattgatcctcttattgctggtaagtctcaggaattttttatacatgggatgtagttcatcgctaacttttatctctagaacttattgctggatcgaagaccactgacattggtgtgaagaacgccatgatgaaggctctccaggaggtggttggtaaggccggtgcaaacatgagcgaggcatctcggcaagcgatccttggtctgattgatgatgacgctagcgaccagaccggtatgatcattactaacaattcacctgtttcacagctttctaacctgctcacagattccgtttccattaccaacgctcgcctgctcggtgctctcgtgaaggtcctccctgccgcaagctcggttcctctcatcaagtatgcatattcgttttcatggtttgattttgttggatgctaatatatttccttccccctaggaaccgtattcttactggctccctttctcatgcagcgatcctaggactcaatgctctgttggctgaatgccctggggttctgtcggaacacttctctgtcgagcttcccaccgtcatctgccaaggtcttgcaaacaaggatgtaagtggaatgctataccacccagtattgcttgaagctaattcagaaacagcccttcatctccgacaacagcgctcttgccgcaggcaaatacctcttgtccaacgatggcaaccatgctttcgagtcaagcaaggccatcttcgaggccttagcatctgccattcaagttggcaacccggtcgatacccggcggttgagcttggtagtcatccggactgtcagccgtcttcaccccgagctggcccgtcctcatctggctttgctcgcaccgcccatcttcgctagtgtccgtgatctggtaatccccgtcaaactggccgccgaagctgcattcttggccatattctctgtggttgaatctgatagtgaggtgtttgacaagtatatggccggtccaggtgcatctctcccaccaggccccaagcgcagcatgtctgattacttcaagcgcattgccgttcgtttggccaaccaggcgcgtgagcgtcgggaggctgaaggtggtgagggtggcttgggactgtcgaatgatgaactagacgacgaaaaggaattgtggagcattggcaaggttgaccttggagaggcctttggcgatgagtgatgatctgtttgcgtatccaaggagcatctagatgtttatagatatacccttgggttttctttgttcgagtcgtacaaaagttatgcatagtaagtttttgtatatttatattgtgtcattatacatcaccgggcagccatgtacgccgtacagagtggtggactttattatattgcagatcactctttcctagataggaatatcaaatcaggtgatactacttgtcttcagtatcacgtgatattgttcgttttttggccgtctacaacgaaagccacggcaaagagcgaaagagaaaaaaagaagagaaccccaaattgtaatcttgttattatcccagcatcttcattcgaacttttcccaatgtaagtaagcttagcttccccggactgcaagatcttcaagctccatcatcccaattcggactagcgttagggtatgcaccctggagcactccgcccattgtggaaggagcactcgcttagccctcggctgacctaatctggcccgcagtgccctctcaaactctcaccgtcgggatttctcagtgccacgaacatcatccgccaacgaccgtcgatacgccgacatcaagatgtgagtcccatctccaagctgttcttgaacttctcgaatgcactcccgtgtgctgtggagattcatgtcccaacacccaactcgtgcacccgaaattttcgttatagtggaggaacaacttcgtgatgtgtgtgctatgatgctgaccgggtctttcaccaccacagggtcaaccttaccacccagaagcgcctcgccgcctccgtggtcggctgcggcaagcgcaagatttggctcgaccccaatgagatgaacgagatctccaacgccaactctcgccagaccatccgcaagctcgtcagcgatggcctgatcatccgcaagcccgtcaccatgcactcccgtgccagcgcccgtgaactcaacgaggcccgccaaaatggccgtcaccgcggtctgggtaagcgcaagggtaccaaggatgcccgtatgcccaggtatgcacaccaccactaccaccaccgtctttgtctcctacatcggactcgcccgacggctagaaccaggacacagttgctgatgtcgattttctctgtttagccaagtcctctggatgcgccgcatgcgtgttctccgtcgtctgctcgtccgctaccgcgccgccggcaagatcgacaagcacctctaccacgagctttaccacctgagcaagggtaacaccttcaagcacaagcgtgccctcgtcgagcacgtaagttacaacccgaatcaaccccacggatgacgatcgaatatgaacatgaaccccttgaattacgcaaaggaacggatccaggctgactcgttctctttttcaccgctacagatccagaaggctaaggctgagcgtgcacgcgaccgtgtcctcaaggaggagatggatgctaagcgtgccaagaacaaggctctccgtgagcgccggttggagcgcaaggatgccaagcgcgatgctctgatcaacgaggagtaaatctgatacaaaaattcaattgcccttccgttgtttgacgcttttctcgcaattcggcggtccggaggttggaaacggttaacttctgggttggattcgggattctaggttgttcccgatatcaaactcaggtcggccttcggcatcttcctattagtctagattctgttacgactttctctccttccctttgttttccctgatagcatggggttcgtgaccttattggatcttttcggaaaatatggggtatgggaaataggaagatgcgatgatgatgtgatactcaagctattcttgttaagacgtaacgagaaagcaaaaggaaatctttttctacttcaccaaaaacccgaaacaaaaaccgcatgctctttcctggtctatactaccgcttgtggtataaacctgatatgcggagaagcagattgtgtccctctataagccagtagataccattccctcgatggtcttactcgtatactccctatactctcaatcttgctgctcgtgatcagcccctgtagctgacctatgagtggcatgtctattttccatgcttcatgcagactttatctcgataattccacgatccttagcaactgcaacctcgtgggtcaaagacctccaatgtaatttatggatcctgtacctcccttctagggatttgatcacctctatctatacttgatagctagcctacaacattgacatacgttttgtgtgaagaataaataaatcaaaatctaaccagtcgaagtatcattgccgctgaatatgttcatatatatctgtaccccacattcccataatcgtccgagtataaaaatctatgattagcagccaaacatcggggcgcaatgaaagtacaggataatatatgaaccatagggtagccatcgcgttcaactaattttgaagtatcccaatgacaattagacaactattttacctcgagcatggtttcatccaaaccccgagaatgtagaacgcgactaatttcaccaaccgctagaagaaaatcaggaaatgaaagcatggtagagatatgaaatactatgccttggaaagagaaataacattttgagttctcctgccctttccataccaatataacccaatgaactacccagacctacaagttcaacaccgaaatcgagatgaaatatgaatgggcccgaagggaatgccagtaagcaaataaatacaaacaatagaagaaaagaaaacctacagacatagcattcgtaagatcttgccgtcgtaaaccaaagcaaagccaaaaaaggcaagtgtatcagtgtaaacgtataatatatgcaggaagccaaacccaaaccgaaagaaaatcatgaagcaaaaccaaatccagcccgaactacaacttgacagcccacatagtcgggatcgaaggaaccgaagaccggtggtgagcattgggcggaggctcaagatcaagatcgaaggggtcactgcgcatgctatcacgcatcatagacgcatccaaatatccatgcggtacagcgagggaatccgtgcccgcacgctcgcagtcccagtgcccttgctcacgaagcccggcgtcgcgggaagaagtggagtagagcgagaccgatcgagatggggctgagatttcgatgattgcagacggcgggtttgtgaaggcctcctgcgctgtctcgccacgcaggtacatgctgtccagagataggtctggattggagggctgttgttgtagcggaatgactgggagtatgggtgatcgcgggccgatgtttcctgggatcgaggggtaggagtggtagcggtggaagtggtggctgattgatgagctcgttgagtcgcctcgtattagtttctgtctgagtcctagccgctctgttgttattcttcgtcgtcggtgacgcatatagagtgcgcaggctagcagggcgaatatcatgattgctgatcctccgatgatgctcccaactatggttccgattttagaggatgcggaactcaaattgtcggcttgggatgtttctgacgagtctgcgaccgtggcagttccgatggatggtgggattgaatgtgagtttgatggtgcggtgctcaagctggccaaggtactgatggaacttgtcgagcttacggagctagtcgctgtctctggcaagataggcagtgatgatgaaagagatatactcgggctagttaatggaaccggtggaatccacacgctgccaggagcatcggaatgccatgagtgatggtcggaggattcagaagtcgccgaaacccccatctggcttggtagaaccgaggttgttggaataagagtcgaaattgggggctccgagatatcaggtgctgtgatggtggtgtcctgcttaattgtccactgcgtagtcgttgccagagtcacggtcaccggggttaggtccaatgttaacgataggaagtcaagcacactggccgcggtgctggaatcagtcccggattcagatatcgtgtagacccatgtaggatggacagtttgcgtttcaattgacgtgactgtcaccagatttaaaggtccagaggataatcgtggggacaacgtctgtgtgaagttgttgagcggtacagacggagtatcaatagcggaagaagcactcgacatctcgccgagagcccgcagggggcaccgaccgttaaaaggcagatctgatgatatttgccgagtccgtattcgatgaatgggacataggggcgacgtgaaaggatggatccctttgtatgcgtattggacaaagcacaaagtgacaaagcaaccaacaaagcagtaggcttattaagttgactctgatggttcatccaagccacccctatttcttgttttgttccttgaagccttgagatagtcacgaacataatcccgtcgcaaggctgggattccatacagttcacgattcaccttcgtggtccaaaaagtgtatcatgtcagatacagagagattaaaagggtgtatacagagacctttgttttcccccgcagaatttgtgaggggattttgcttttcatttgtctagagctcggcgcttcttgtgatgggtagaagcaactcctgtgacagatgaacggcgcttagccctcggtccaataagaccatcaggcaatccacgggtggacgatcatctccagaaaatatgggaatagaatatccataatgtgacactggctaaattttccatatgcgcacgatctcgtcattattgttccctaggtaggatttgagcggggatgtgtatcatgtatcatagacgaaacacggcagtttcggatttggcgagagttttattgaaatttggactggtccatcctggtgacttcttgaagtttcatgttttgcctagctcggctgttggtatcttgcaggcttttgcaggttttgcagttgagagtatgtcgtcggcatagaggaatcgtagcaatgcctctttggtagagtcatgtgactatatccagataagtaggagcagtccacatgtatataatatccataaatgatatacgagaggaaagggagaagcaaaagggcagagactacagtactagaacaaagtacggagcaagtatgtaggagagagagtgtgatatcacttttacaagaacattcccccctcctctgttgacccgatgaaagccctgacgaactcagtcatgaatatttcaagtcacaaggaaaggtcaaaggtcataagacatataaatggtagaatttatgcatcaaattcttttgttaagtcggagagcgctgaaggacaaatgttcccgacaaattccccaccaaaagttccccagttcctttcatcttcttccatctctcttctccatcacttcatagggaagttgtttttttcttcgacttcaacttctctgtttatttacctgccaacttatctcggtgcttgtgcctttggtgcctttggtgcctttctgcctttctgcctttccgccttcctgttccctgttgtgttcccatgtgaccttggggactagaactttgcgataatcgtgcatttgcatttgcattagagctgtgattgaagaatgtttggctggggttctgggctaggtaagcaatctcccttttgctacccctcgatgtttcccctcccccgccatacccctgtggcaagtcgaaatgtcaacacaagttcacctggacagccttgttggattggagccctgactgtggcttaaagttctatgcgaccttagatatgtcagccagacttgaacgagagatgaaccacacagtctcaagctaacacaacttcgcgatagccttgccctccgccacttcagagccggagaaggaacgcagaccccccgcagacccgacacctctcgatttccccgtctataacctatccaatgtactcgaaaatgagtcggaatcaagactcaaggagatgcccgaccttttggccgacatcaaacgcccacaggacatctgcgtggagcgcttcgagccgttgaacctacaattggaaaccggcgtcgaggtcgcccatatgatccccgaagaccattcgcatcccctcgcccccttgccatgggaagataccaccgaaccgacggaagacaatcacccaccgttgatgggtaacggagccccgtatccctcgaaggaacgatacgaagtcctggaaaaagagctagcgttggataatgacgacgctttccgcgaggtggctcgattgccgccgcgtgagggtcgcgacagggttcgtataacacagtcaaggaagttctggacgggattggagcgcatggctcaatactgggataccagcctagaccattactacgagcgcccggcaacccccgatccgacacccccatctgagatggagcaagcaggggatagcacaatgcagatggatactgaggagtccagtagcagacatactctgacagaccatgaaatggacctggatgaaggacagacggtcgcgccttcgaccagcggcaatgttggcgataagcagcggccctctgtccctgtatacacgggtcgccgaattggcaacggtgccgagatgcccgatgaaattcgtgacgagacaatccgagcctttgtggagatggccgcatggccattcggatgccaggtcacagtccccacgctccaaccacggttgactaccaagaacctcctgttccccgtccggcaaacattccagtcctcgcggtccccgcgagaccgccagatcgcgcggagcggcatgctcgaaggccccgttctcatctcacagtgtcgacccgagacatctttccgcactgcagacaatacccccgggaccgggattggcgatgtaagtgatttattccgcgaagtaggcggcatgcttctcgcggcgcaagagcgtgcccgcgaaggtgcagtcgagaagcgacccggcgagggcaaatggtggaccatgcagcctcgcttcggaggcgcccccaacgatgggatcctggatgatctcgttaattacggacacgggatgtccttgccggactcaatgatggaagaaagcacgtcatctgcccaggaggcagagagcgcttccaaacgtcacaagttcgagcatccatttgtcacgtctctctcccggagaccgagtgctatgcgcagacttactaccagtgagaagtggaagatactgcagcctggacctagtctttgggacaagcggatgagttatttgcagataggcaaggtccaggagagtccgtttgacgatgtatgcatacccggcctcgttcattgaaattgagtgtgcttttgacggccagacaaagctaacccttcattcttttttttttttgcagatttacatgatctcatctatcaaccatcacgtctcaatcctccacctccgcgttcacaggcggtatttggacatcctcacccacggggacagcaccttcccaccaaccgaaggcgagccgtggcatgtgctaaagctgcagaggactcgatggttcgacctattcgatgccaatgaccgcatagaagcgctgaagggtgtgtggcaactattccaccaccagctgagacagacacgccacgaaggcgacgtcccaataccgaaagaattacctttagagtgtccattatagagcatgcatgatgctgtccgtggggacatgcttttgactctccggctctcagtggcctttctcaagcgatgcatcttgtacatatggcgcagcaatcttcggattcttcccgcttgctgccgaccttcactccgttttctacaccatacccatcttcaatgaatttacaatcttgagcatattgatatctggcgggcaatttatatcgattcataagtgatatctcttttcgactggagggtggttagatgggtgatttgggatttgtgttctgctttgatatgcttctatggatacatttttgatatctctgttttatttgtggacaacttggtttgatataatgcgtacatatggcgagaccttgacccgaaattctatcgatctgttctcagtcaggaggatccaattcaatcacaaccatctatctatgcataacttcggagtgtataaatcaagtactttctcacccattcaatatatctcttacactgtgttgtcgtaaccatccattttcactgccataaaatccagttcataggtaatccacatcccaacatttgaaccctcggtacttttgtcatagtgagaccactccaatcctatacgaaatcaccaaccctcacaacatcatcttctaatgaaatcaaaccaaggtgccggacatattcggcgtcaagactcaaaacccatgacctcacacaataaccccgatcatcaaatctcgccacacaccaaaaacgatacaagtaaaaaagcgagagcgttccagaccagccaaaagccgaccaaaatgtgatatgtccacatgatagtccctcttaaccctgcttcggttgtgtatggcgtagatggtaggagagtggagcataaataagtgggcgccgataccctttttggtgatatttcccgatctttttttctaacttcgtatacatactccgtactatacagatttacttctaatggcacacgtttccggggctgcagagtccgggcttgacagacccgacattccctcccgtaagtttctcggttacggggttcgcttgttgcggaccgggataaggctgtgtatacggagtactatatatgccctccgtactccattccctgtctgtgagctggctagtgggatctggttgcggtgagagtcgtgtgtggcaatagatcttcatttggcttttgtttcagggtctgataggccttggtgtggtgaaataggagctggttggatgccttggaaagaggaagcaagaatatgcaggtggatttatccgttgatggggttgatttaatgcttgtttccgtgtatattgtgtgttttaagcacaagtatatacatatgtagttatacatcaacggatttcgggatgggtcatggtgatgatatgtatagaccattccatgtaaatatttacttacaacatactccgtacatgaaatgattaaaagtccaagccacatcatccaaggctaaattattcggtacacacttcgtattctatataaatcctatcattcaataaaaccaagtcgtattccatacctaattggcctctcccaatcaaacccagagaacccccaaaacccgggtatcaacaaccgccagctgcaaatcagatcacatcacacgttcaaaacaaaaatcccaacccaaatctaactagtcctgggagcatatgacccgcctagcagatccataaccccctaagaacagtagagacatgggaacctcggcacggaagaccgcctaatgtggactagcaaaagtatggcgcgtacccgctttactgcaaaagccatgtggaggccgtggagagtgaagattgaagagattcgtgttcccgaggaccaagagaatgaatcgcggtagggtgtatgagttatgtacttttaaacaagagccagcacttgaacagaatgtggctaaaaggctaatagtaggagcacggaatacaagagagccttgaactcagttgactataatggtagtataaggtgatcaaaatgaaatataatatacgagtaacccaacaatctagttgtttggtctgatggattgaaatgtatgcgagtcgcttcatcgaggacgcgttggtgggggtgtatttgtaggcaagtacccctggaggttgacaacctcaacttcaatcccaggctactgcctaatagagaaatacatatgcaggagcatgacttgtgtgtgtgaatggtatgcataaagtgggtgtgattccaaaatgtcggatccgaatactccatacagccggtaggatagttacgtttgaaatatttgtccttcacggcaaggtacacagccgcgctaagaggctgtcggcggcccggcggacggtttactttgctgtagtacgaggtacggaatatacagagtacggagtacaatagggtgggaggccgctagtagccaataacttctgacactggccggccggttcgaaatcggactggactctcctctccttccaaaagggaattgatagtagctcacgagaccacgatattggttggaatcttgactttcgtgacttttgcctggtggtgggctagagcctctgcaagagcacagatcgggatcagggcgccggtcttgttcttcagttttttgttttcagtttcccttgcatctgccgaacggaccattggttcatgtgagtgagttgggtctggtatttaagcctcaggtgtttgtattgaattgctactcaagggatgatgcagcgtaaggagggttgtttttcatatgcatctggcctgatctagccctaaacttgatgaccttgcggaaggcggtagctttgcgccaggtggcggggctggtatagacaagtgaattgcgacggaatatgacaagtagggggaaaaggtcctccagactcaaaggcccagcgataggtcaggccaagtagatcccactatgaccacatggaaccgaacccacgtgggagagcatccagccggacttcagtggctaagaaggcaagtcagaagcgatcttgacgtatcagttgcacagaccactgtagaaacagggcgctcaaagttgagacgagatctcacgcacggtgaaagtctgtgttgtacaatctgtacacatcacatttcccttttgtggagcgtggaggttatgaaaccgaaccgtgtcgtgcatgcggggatgggcggagaacgaataacactagattccaaattgattggtagttccaaatcaaccttttgagatgagctctggcagatttacgaatctgtgtttgctatgcagaggagcgggagagccccgatcgtgaataatcatgtcgtgtcccgtgaaattctggattccatttcgataatgccagctaagaggcccacgaagcaagtctaggctgcccgcataactgatcatctaatgtacagtggtgatatgtctagctaactagttgactaactatggaatggaggtgatcacattttagctgaggcggcacaaccaatctatggacgaatcacgcgcttacatcgccgatgaggcctaatgatttgagattctaatggacattgagatatcgtattgccaattcacctatcagtattgtgaagttttcggcctttcagcattatgtacgatatatacccggatttcgagaatcccagaatatactctgtggactagactagtaagaacccacgctctgcataatcgtgcgatatgtttctggagacaagacatggaggttggtgggctggagttgcggttgcaatttggttttgaactttgtcattggcgcgtgtcaacactccctttttaggctatacttgtccctcactagccttacgataaaagttacaggcaactacgtcaatatgatatattgttgatgttgttgtaacacagcatgtccatgcatcttgttccatccctatctagatactggaggtttaagctgcagcccattactgcctaaatatgccaattgcacatcagagtctcagtctaatgcgaggaactcgacctattccgcgaccgctatgcaatcttccgtgttgcctcccctcgatcgatgtggggatgtttgtcaagggagaagatcgcctgcatcttccccatacggagctattccaatgcgaaggtgatcctccgtgctgattggatgtgatttaggtctgctccatacttgttcagattctgaggctttttcggacgcaaatctccacgcagtacggattactcagtactttcaactatatttctaggtatagcttacttctgagtgctgaacgtgtaggtgggtagtagtgtcatcaaagctcgagcctggcgttgcggtgcgagctcagggattgaggctctaagatacttcatagtagcattgaaagccaggctatgacataggtgtgccattgagagactggactttttttcgtttccagatagtgatcatgtcatgttgtggttaccccttgcgttcgacattggatatctaatgactttgcaaactctattccagatatctacatactgcaagatgcatggcgtgcagtcaccatctgcacgatgtaggcccgtgttattttggaggctagatctgttttttcaatgtgttatttccggagaggaataaatagatgcctgatatattttctttcattcctccttccccattaggtaaggaaatagcccgtgccgattcttatgatacccactaaaatcaagactttgggcagcgacgcgtagccacagataacggagacccgaagatctaaaccaatgcgccgttccaaacctacggaatataatagtggaaaggataatggaagcggcagatcgacagggcgagtcaaaactggaacgcagattggatactttctatgctgctcgtgattgaaatccatgtaaccccgataccccttaacggtggcaagaacttgcgattcagctgtcaaccagtgggatgtcttggaattcgcaacggaccgatgaaagatcattgcgagaatggactttgcttctaaggttaggttcggattgtttctcattccgacttttcaactcagattccgttcatgcaggtcaaatcccgtactcccatgttaaagcatacttgatatggaagaattacttctcgatgccatggaggattggaattaatcaaggaacatttgaacaaacaaagaaagaaaatcatcgcctaacaaagtcttggctccacgcggactatttgcactataagtagccctaaaatttgtatatatccacacttcatacactacccactatattcggaatacactggcatacaccgcgaacttgtactccgccacaatccttcaatccttcagcttgattcttaagtagttaaagcgggtggccacacagataggacacaaattaacggtcaaaagaaaaaaccaaaaaaacctccaaaaaaaaccaggaatgcggaggcaactctgtgctctcgtgccactttcaatcgcgcgtttgactcgctcagaagtcctccgactagggaacaccgttaagtcttctgtggcacggaggtcttgagctgcatcctgatcaagctaggggtaaactgtgttactgcctaagttgggaaggaagtgagttgctaaatgaacgtgatgtagtattcgtttgatgccaggctctaacacgatctcgggcagaaacgtgattaaattggacagcatgtcaatccaatccactttctatagactagaatggtttttggagtacgaagtagtcttctggaaggaaacccctggaacccgtggatggttcccgtcgtcatccgtggatgggaaaacgggtaaaccttggaacccggttttactatgtcaggtatttatggtaattaccatcccatttcatgtgtctactaactatggcatactatcgatgtacattatactccgtatatgttataattgtatgttattgccccaatatagatttcaaattcagtcgaagtgtctttcagagtggatgcccccaaagtgtatctcgattaaacggagcaaggtgcccgtagccctgggttgctgatcagccccgacaaccatctccctgggaagccacgggataaggtatcccttcgagtgactagtacgccgcggtggctggaagctttctgccaacatcgccgatctaaagctgcatatccactgatttgagaatcgagtccgaacagagtttatcttcagtgttttagaaatgaagcgccccttgcgagttatgtttccgagtctatgaccgacttgacggccagtgcggcgtgtgttattgggtgcttggggcgttgaaggatattgttcttggcatataacatacacctccactgcagtttcggttatatactttccgtgttctcttggaagataatagtcatagatatgtggactgatctagatatcttgttctaagagtacccgagtcctgggtactgggcagcgatccctgtccgacacaccggtcacatggtaatgaagaagggaaaaaaagaggattattaggtttagaatcaacctcaaacaccgatgttatcactctattcttgaaatccgcccaggagtcctcatcctaagccataatccaagggcaatccacccagtatacgtaactctcggaatcaagttgcatggcgcatttcccggcgaagcggttgaccttcgggcggcaagttcgatccccgttccacgcggaggatcctagcttcgatcatagcacttacatagtattctatacaccatagtctatcacatctagtgatggggtatccatatacagacacacattgcatattgtaactatatcctaaaatgaggacactgttaatttctttcctgcagagcatctcatattttcccccagccgccggacccactgcctggtaaatccagcaaaaggaaacaaaaagcagacctgtcaactgtaacttgtaagtattgtactccgtaagtattagaggttggtgcttcttttctcaggggtctatatggttattatatactctgtgtgagagatcaatggtcagaagaagtcatcggggtcatttgataatttctttttctttttctttttctttattttccttaatttgtgtccaaattcgaggtatttgatagtcaccgcgattctcaagagcatgtatttaatccagggaggggcaaacaccgctgtcgatccctacaggcgtaattataaccaagtgtgttattactttatgtcccccctcccctcctggtttagatcatttctccccttttgtccgattcttgattttttttcccttccatagttctcttttcgataactactgggacgtgatatatgtacctcggacttcaactcacttggcattgtcattaacctagaccgtgaactcaccttacatccacaatatactacgagtatccgaatccgaaccccccacttagtctacggtattggactacccacaggtacgtggttatattacgctcgtaccatacctgaccgaggtaccaaccgtgtggatacggagtacatggaatgttctcaaggttccaacttgcacttcaggtgttttccccctccttgtggcccaaccttgtacttctgtttgcgatctatctgatatacgggtggatacactgatctattttgatttccttgctctttttccttttccttgatatttcccatatctcggcctaacgggggcccctggtcggatcatcgccgtaatctgactatttctttgtctagctccacacccggttgcccactgcgccatcaccaccgcatttttgcgacctaggaaattcggagctttagacacgttatttgattcgcacgcttctaacggcgcgatctgatttcattgttacaactttcgctccttccgacatcagatccaccaatccgtcactcattcgtttccttttattacatcctacttcctcgactccaatcgatagcaccatgttggcttgagtcccgatttaccaagctcaatcgcttctcaacggtaaataccaagtgccaaggaccccaggctagttgcgacaagaccacaagacggccgcgtcttggtagcttcaaaacaccggcgcacatcacccggaccctccatttacaatgaatcgcatgcctcccccggaagggcaccacgcgcatgcgggttcgcatgtagcatacgacccctcatggcgccctgcataccccccgacattcgataaccacctctccgacccccgccgctccgcaaacccccagactaccctacccccgcagccagcaggataccctgtgatgcccaaccgtgagctaccacagttaacaccggaaggcccctacggtcgtccgaatggtcatggcctgcccctacatgcgcccgtgcattccccgcaagacccaattccccagaacttccaccagccaatgaatggcgcgccgcatgaggcctcacctgattatcgccctcgtatgggctacccgcccccagatcagatcagcagtgctgagcatacacccgtttcgggtgccctgcctcccgcctcccaattcatgacacccgttgcccaaatggcgagtgctacgccgcctgcggggtatgatcaggcattttatcaaaaccagacgtttggagcacgccagcgtaaggcgaatagagctacgcaggtatgttaagctagtagaacacagtatcgtttcgggggatcccagactaatactcgagctatataggcttgtgaccaatgccgagcgaggaaagcaaagtgtgatgagggacgaccaaattgcagtcactgtaaagagaacaatctgggctgtgtctacaaggaggtgccgccacataaacaagagaagaccacccagctggtattggatcgactttcccagatagagaaccgcatggaggagcgagacaaccgcatggatgagcgtttcaaaaaaatgcaaatgcaaatgcaagagcagttgctgaacaagctgggcaatcaaccacctccgactgtccaagaacgtccgtctcttccaccaccgccaccgctcatcaagcaggacccgcctttcaaaacagagatgcctcgtccccatgccccaactccaaatattctggatcccggcagtcaatattcacaatttggccaaaatctgggacccatggacccgagactcgaagatcagagggaggctgagggagagctctccatcccagtggagcacaccactgcagctcacaagctattgatgtggccgtcaattaagaggctgctacaccctgaacaatatgacgaggactatgtgatgcgtttggaagaagagcgcggtctcctgagcatatacggccaaggcgagatttcatacaccgccgatgacagtcaattaccaatggatggtgactccaagggctccaagggtgtccgacccgacggggatggcgcaggaccagatgctgatgtcgacatcgacgaatttgggaacatgaagctggatgctgcaactgctaggcgctactatgacagctacatcgagcacatgtttaagctccacccattcctcatgatgggtgagctcaatatcaaggtcgacaatttcatccgatgctattgtcgccctaatacttcaccgagttcggcttccagttacacacgactagcgcgcgatgggccgccaccagccaaaaggaggcggtcgaacgaaaacctaggtgtgcgtggcgagttcatgcagagcatccccaacccgccgcggccacgggtcggcaaaaatatcgacaatgccttggttatcctgtgcctggcccttggagctatttgcgaagctcctgcccctctccctgggcctatcatggacaagaagattgactaccccaaccagcgcattcctgaaccgctgccaccgtttattcctccgccgaccctaaatgggacatacgttactaatggtgtgctctcccccgcaaactccgactcggcggccatgcagatgtcgctttcgaattctctttatactgtgccaactcagcctcccgggcagtctttccctgacagtccactcaacaaaggcataccaggtctgtcaaggagagatgtgacaaatgtgcaggatgaacaagggaacacaaagaactaccaggctattcctggcctgactctctatggatatgcgaccgcaatattgggccatctacagggtggtaacgagctagagcatgtccagtgtgggttgctcgctggtctttatgccggccagctggcccaccccttccaaagtcacagctggatttatcaggcctcaagggcttgccaagttcttgtgagaacaaagcgatatgagcgactcgaagaggggcctacgcaggacctgtataacttcgcttactggacgtgtctgcaattggagagtgatctgctcgcggagctggatattccagcgagtggcatctcccgctccgagggtcggatggctattccgaaaggaaaatggactatcattctaccgaacgatctcaacgcaccccaaacgatgatgatgctgttttattctgctcaaatccatctacggaaagttttgaatcgagttcatacagacttatacaaggtcgaaaagcaaggccagacacgatggtcatccaccgttcaagaagctctgagcctaaacctcgacctctggcgtaaaagcctcccacaaagcatgcagtgggacgaaaacgatccaccagcaaacgaaattaacgccgctcgcatgcgtgccaagtattacggtgcccggtacatcattcaccgacctcttctctaccacgcattgcactacggccatacaggtgctcgcgtcggtccagtcggccactcatcagtgaactcgcctacctcgcaacgattgtctccctcaatgctgcacagtgctcgggctccgcacatggcacgtatgtctagtgacataggctctatgccggccgcagtctctgcggactggcaaccacctaaagtccgtttacaagatctgccgaggaaattgaaaggggcctgcgacatctgcattaaatcggccattaagagcacggaggcttttgacggtgtaggcggacatcggttggtcgttaccaacattttcggcactgcccatgcgtaaggaatcctctgaccccgtttcaaagaatcacagctatggagatgagactaacctattttatttgcaggcaatttggcaatatgcttgtcctatctgcaactttcatgtcaagtttaaacgagcttgtcgagccagagcaactcgatcgtctccttgtccgcacaataggattcctcattcaaagcgaaaatatatcccccaccctccgcgctgatgctcgcattctcactgaaatctacacgatgatcttccatcatcctcctgatttgagacgagtcaccagcatgagtagccacactcccagcatgagcagtcatacccccagcatgaacagccaaactaccagcatgagcttcccttaaatgtgcatccagcgtccaagttattttttttgtcctgttcctgtgggctttgcaacccgatacctgatatcctatatccttatgaacacatcatgcatgtctctgcctctgtcccttcaagcccgaatccttacacgctcaaatctgttatctgcctgtcttctataccttgtgcactatatagtccttttcattgatgattccccaaccttatccgattcaacactccacactcgtgcatctgagacaagatcagatgacacgggagttattggcggtgattgatcggtatggcttatttttatacgccgagaaatctcacccattctttcattgcctctcttcaagtgatgactggattggctttgactcgttcctttttttttttctcttctctctcttcctcttgtctcggatttcgaagcatttcgtggctccgacggtttgtccccgcagagatacgtggagttattgtcttgtgtggttattctatttacatcacatgcatcccaagccgtacacgtacgttggatgttcttggatgctcttacaatatgccaacttatttctgtgatttggctgcgccatatcgttttcatttccatattcaatgcgaaagtttgcatttcgtggttggcttttggtgttattgcattatagctcatctttagtgtgagctgtctttgggggattagttgctgtaaatttccttctcggtagtttcccagactggacaggacagatcaattgagatgaagtcctgatattgctcgatcaaaccctagtgggaatggtagctttggggttcgtgcacaagcttggaagtaccagaccctgcggttttgtgggcccttccgctcccacggtttcaactcccacggttttcatcagggccggccggtatcaaaccaaaattattcaaaagtctaactagaataatttggacgaataggcatgtatatgctattattatacctatcattcctgacaatcacagagaaagcaaatgcatgctgctcgcggacctcggcttctctgcattgtgctgatcaagagtgtgttagagaccgtatacatcaggcatccttcgttatctttcaggtcttgaaatggtaaaaatcgacatacatcccaacccagacatgacaagaaatgcaagaaatggacctcaagagaagagatcgacaccttattcctataccaaccagccaatgcttatataacctcaatcttcacagctgatgtgcacggcaaatttacctctcgaagttacttgccatcattgcttttgcccaatacgcagtccgaggctgttataatgttcgcgtcgaacatcgcagacgtagcctccaaagtccgcggctcctaatcaacaacacaggcatctataccaacaaccccagcctatacgtgccgcttgttcgaggtcaacccgctcgcgcactactggctctggcaggagtttctgtctgatacgatggaagcgaagtatggtatcgtttttactgtggctttgcttgctgggctcaccgttgcgcattatgtggtggattacttggcgtccaaggctgcggctatttcgttccacggggggcttgttgctgagctggttacatgataccatgcactttatgttcgcactgtccttgcgacccaaggcttcattaaaaccgttagtattgaagatttgacccttgaggatacttcgtttaatcccccgcttcaccctgcgaccattgccgcggagcttgttaagcaagcgcccaaggctgggtgtggacatgttgttgtgcctggatctgtttggtggattgcaaaatgatcaaagggctgtctggatggttacagcatttgctgggatgtaggttggagaagggtttccagtttgatggagctactggttggacttgggttggtctttgatactcgaatagtgagtggtgttgtggctatatggttgcgctattatctgtcatgttgatgcagatagttattgcactcttatgacaataatatttgcacacccatttaaactactttgggtatagcgcttcttggccaggctgatgcttttagttgttcgcaatggtacaggtagcatgtgacttgtttttatataggcattcgggagtgctctctgccgagaaggatagaatggatagatttagaccagataccattatcttcagatgtatcgtcgaggcacggagtattccgtactctatacttccatagatggctgggaagaagtgaccccagccagccacattctggtccgtgcacgatgcttcaccgcgattttgattcgctccacttgttgcaccgacagttcatcagcgctatgaacacatttttcacagttgcatttctcagcagatcgcctgtatctcatctaacccctaacacacagattctatccgatacccaacactagaacaagagaataaggtgaggttaagggccatcaagttgagatccactgggggccttttcggatacaagatccatgggtctgctccgttgtttactcccccaaacaaacccataacattgcgttccttctgacttacaacaaacacttccaccccacacctgcccccattccaatcattccaatcattccaatccttccaatcctttcattccacatggttcgctccggctatccacattaattgcctactatgttcaaagccctgatgggcgggggccgctcgtcgtcctcatccgacgttcgcagcagttctaagagcagccggcgcaagtccgacaggcctgacaattctgacacaagatcgatctcaagtcgcaagtccgcacggggtgacgaccgtgaccgcggcctgggtgatttgtcgtcttattcgtcttcggctccccgcagtaagcgtggcccacttagcaccgctggcgactctatctcaacctatgtgaccgccgagacagaacccgttgatgacgccgatcgcgactatattgaacgcacacccaaacgcagagacagtgaacgagaaagcaagagttctcgtcagcgcgaccaggaccgatctgaaaatccagagcgtgagaagagaggtagccgccgaggaacagaagatactctggacgatgacttggatcgggagcgcgacagtcgcgagcgtcgccgcactcagtcaggggacccgtatgtgcctccgatctccacaaacgtgtcggctagtgcccccggcgcgcagtttgccgccgagattggcgcaccgggattctcgcaattccccatgcaatacgacactgggatgccatccgcaggccattctccagcgcatgaagttccgtatgatccgcacgtgcagcaacaattccccggccaattccccgagcaagtttctgccccatatcggccgcctaaccctgctggcgctgcggcagactactatggtgaccaaggccagtctgttgagcaccagcccggtgttcggccggctcccccaagtgtgcttccgaacacgcaagctcacttgatggcagcatctccatcggctaatccacctccagagcctagtagcctgggcgaaactggtgcggcggcggcctattttgacgacaacttccatgctccggcacagcaagatcagccgccgatagtgcctccatttaaaccatcgaaaccgtctaagccttcgaacccttcatcgtcgggcgttcttcctgctgccgccgttggagctgccgcctatggcattagtggtatgatgtctcactctgagtcgcattcccctccgcagcacactacttcgtacgtccagcagggtcagccaacggtacatgaccaccagccaacggtacatgaccaccagccaatggtacatgaccaccagccaacggtacatgaccatcagccaatggtgcatagccagtcaatggaataccctccattcaagccgtcccattcgcatagcttcagtgaaggtgtcggcattgcggctgcaggtgctgcaacggggtacatgatagatcatcaccatcacccctctagccccgagcacgcacctcattacgcttctcagcattacgagcaatcttctcaggctggtggtatgccgccgtatgcccctggccctagtaatgctttgtatgctccaagcgcgggtggatacggtgctcatgctgcctacaacccgggttactatcctcacggacccagcgctctggctttccaagagcgtcagcgtggtgccatgggaagatttgttgatttctggcgtgaccctgaggccgttggaagatttgaggactacacggaaagtataggtgtgtgcaaatactgtttccaacctggtacgagctccatcgatgctcctcgcaagcaccattactacagaaaccgccgacactccgccgaccggcggagcagtgggagctccagagtaagcaaaaacagccgatacaactcctctgaagatgagggccgccgacggtcaaagtccaagcagtcttcctcgtggctgcctggcatgctagccggttatgcgaccaagtcgctcttctcgagcaaggagtttgacgattcttacagccttcgctccggccgagggccctcctcccacagggaagaagatgaccgaaggagccatacctctcgtggtgtgacccgtcgttctggccgcagtcctcacagagactatcgagcagactccaagcatgcatctcagtctggatattctcggcacacaagctcccgatctaggtcttcctcttctggccggcattcgtatctcaaggaggccgcacttggtgccgcagtgggtggggcctcgcttgctggtgcaaagtcgcgtaaccgctcccgcagtcgttctcctgaaagacgacaacgccgaaaggattcatcttcatcatcgtcctttgttaatattcccaggcccagcaagaagtccatcgctggtggaatcgggtctttcttcacttcttcttctgagaacaggaagaaacatcacaccaagaagcggagcggttttttctcgttcaagagtggctcttcatcctcttcattggacaatgatcttgccttcggacataggctgccaataaaatcttccaagcctaagaagaagggcaagaagggtccagatgttgatgccgctttgctggaacttagcgacacagcaacccgtttggctcgctcctcgccccatgctcctgggcgcactgcaggtcaaatgtacacagctcgaccccgacagtctaactacgcccactctaccacacaggatgaagaatgggtcgatgctgagtcagaggaccagttctcttcaagtgttagctctgcgctcgcattcggggaaagcagcaccgagtcttcctccgactccgccagtagcaaatggggctggagatggggaagcaagaagtacaagaagaagaaaaaggacaagcggttgagtgctacaaatgccgctctgatagctggcgctggagccgctgtgatttcttccgctcgccaccgtgatagtaaccccccaattaggcctggaagcctgcagcaagtttacccaatgcctacttccgacccatctcgctttgatgtggcatctgtatctgcaggagagccaactctcatcaggccagggcccattccccttcagcagcctcagcccttcaccccagtctcccaatcagtgtacactacccagggagctgttccggggtcgatccccgcgtacagcaccccagtggccccacccctcttcgccaatgaagttgaacactacgactcgcagtggcagttccaaggtcctcgtgatgcagcatgggcaccagcagaatcaacatacgccgaccgccgcagagatcatcgacgcagtgattcctctcctgttttccctacccaggaaactgcttccaccctcaagcgccggttcactgccaaggatcaagcgtctgtgcagtttaaattgacggaagagcaagcagagagggaacgccaccttactcgtcgcaatgagaactatcgaggtgaagttgctgatcaaccggttcaactgattgaccgagaggaggagctggcccaccaggaaactgagcgtcgagagcgacgccgaaaggagcgagatgaagagcgcctgtataccggcggcagagaaaatgactcctcatcatgggttgctgcagcggctgccggagctgttggcgctgccgctgccagcactattctttctcgcaagacaaatgatgacgaagcctctgaagccagccagcgatataatgagcgccgagaaaaacgccgcgctgagcggaagcgcgatactgatacagtagcggatgcgatcgtgtcgcggtttgagcccactcagcctattaacgaagaagtgaccacgggggaatactgcgaagaccagaagaaagggtctcctcaatcaccccgtccagcacaggtttatgatgattacgccgaattttatgcccccgaggagatacgacatagcccagatgatcatgctcgcagccgtagctccactaatatgcccaccattgtggagataaagcccgccagcgaacgaggtacacatgaggagctcgcccccacagagtcaaactattcatacgaaccctatcaacacgtggaccgcctcccatggcgagtccctgggctcaacttaattgagccaactcctccccaaagcgtgaacggtagtgctgttcgtgacgctacttctccaaccacccctgtgaataagtcttatgataccaagcctcacgaacgaccaaccggctcccgtgtctcctggggtgagcaccaaactcacgagtacgaagtcccttcttcttctgagcaggatcctcttgagcatgatatttcccctaccgaaatttccgccaaggatgttcctctcccggcatccaagatatcccaacccaaggatatttccggcccattgcaatatggggccgatattgaattcgcggccacaattgctgctgcgaccgccgcagctgggttcgacccctctttgatcacagacgacccatcctaccacacccgcacttccccccccgggtcggagaacgaacacacatttacctcaccctggtctgcaccggctcgcaagcagccccacggcttcgtcgagggcgaggtcgaagaaactgatcccaaatctactaagaatatcacttctacccctgagcatgtgatccaggacaaggatgagcttctcttcgacgagccagaatccctcttaggagatcaggatagttcgtcgggccgccgtgacaagtcctcaattgcgcaggaggtcattgagcagctgaatggtaaatatggcaagcgcgaccgtaccacttctcctgaaaaagatgtagatgtcctctcgatgcctggtggctttgatacagccaactctatagacttagccgacgccagatccgtggtctcagcgccggcgcctgttatcatggacccggagaccccgaccaagtccaagtctaagaagccaagggagaagggcgatgccgttgatctctccgagttccaagagcgggaattcgccgggtctcctattctgaaggacgagacaccgaagtcccgcagctcccggcgtcgcggcgacgattttgagatttatgaatcacaggggacgtctccatctcgggctgagacttattctgttgtctctgctcccgtatcgaagggtgaaacatccaagtctaagcccaggaaatccagaaggagtgataatgacttgggcattgctgaataccttgattccgtggctccggagtctcgtgatgattctgtctctgttatctctgctcctgtttcgaaggacgagaggttcaagtccaagtcccgcaaatctcgacggagcggggacgatttcgcgatctacgagtcacgcgaaccatctgaagctcgggatgatatccgctctgttaactctactcccatcggcaaagagtatgtgtcaaccaagtcagggaaaccaagacgcagtggtgatgattacgagctccctagatcgcaagagatctccgaatctcgtgacgacaaccggtctgtcttctctgcacctgtctcgaaagacgagaccagcaaatctcgccggtctcgacgtagtggcgatgatttcgacccacgtcgtgatgccgaagcggcttctgatgacgcggaaggtgacgaggaaaaaaagagacgtcgcaagcgtcgatccaaccgcgaaagtgacaccttgtctgtcgatgacgatgctcgcttgaccattacggacattggagacgacaagtctgagcgccgcaagcatccctaccgctcatcccgtgaaactaacattgatgacaatgcctctataccctcttctccagctcaggttgacgagtccctggagaagcgccgtggcaaggataagaaagaaaagagtgcaggctttttgcgaagtgtctttggctcacaagtctcggccccagctgagaatattcggcctgaccattctcgctcttcttctttagataagcgctcatcccgcgaagcgatatctgaagctggtgtggatgatgaacgccgtcgccgtaagaagcaccgcagctctagcaatgctgatgagctggatccttacatgtcggacaaggagaggagtactcaggacgacacaaatctgaaggagtacaggtctagtagacagcaaaaggaagagcggcgtcgtcatcgatacgaggaaatcgtggattcgggaaggaaacgggaatccgagaaggtatagcatctgaacttttctttttacctacttatgttgtgattcttgttgtacactttattttcccatatagcttcccttttttcactggttgatctaaccagcttgcacaaaaaccacaaaacccgaacaaaaaaagaaatgtactaagcttttattggttttattccatgtgcaggacggatatagtgccaacttcgacgaccaattctttctaaggaagcgcccggatattctagccgcggatcagcgtgaagattatggtgcttcgtggcttccagccccagcggttagcgcagctgttgtagctgcaggatcagaacggaatgagatcccgcagcagaggccccggagccaatccacctctcccccagccacggagaggacacttgacttgaccccgaagtctctgagccgccccgcttcacctggaacaggccgcccccaggagtccccattccccaagcaacgccgacactccgtggctaagtccaccactgaatcgccgacagccgtccctctccacttccgccgtcccccaacttccccaggcctctcgcgcgcagtccccgttgaacaaccctcccccaccgcctccccaggctccccaagccagcaacgcaaccgccggcctgcatcggtcgagtttcgaaactcgcgcgagatacgccctctatggctcgtcgagcgccacagtttgatcaagggtgagcctgagactgaggagcccttgccatcgctcccatctagcaagacctcctcccgagccccgtcagtagaggacctaaaatcccttcgcgaagatgacggccttaagagctgggagcatgtagatctgagccactcaatcatggagaatcagcggccgactggtctgatgatttcaaccgaccaaaccaacgagagtcatgatagagaccttgatctcctcggctcgcagcaggccacgcctactgctgaacacttccagcacgcggagcctaggaaggaaaggcccagatacgagttccactccccctctgagctcctgcgggaccccgctgttctggacgagttgcctccgtcacctacactggacatcctgccttcagtagagggctcccttgttggtgttgcctttagggagcaagaaacgcagcgtgcgcttgatgctcttgagggcgtatctcgccctcagcctgaggcggaaaccccggcccaagaacatgattcgtccttcagtagcgctgcagatttcgccaagggcgctggctctgccggtgttgtcgatgcagctgccgttgccgttgccgttgccagggagcatgacgagtctcgctccttgcctgcagatgaacccactaagacacatgacttcggcgatattgtcgatgcagcggttgccgctgacagttcctctgacgaccatggcaaggcccttatcagcgaggagacgctcattgagcccgtccctgccaccgaagagaatcactccgctgacaatgagtccgtgcaaccgggtatggaggcagccaaggaagtcgatcctgaatcgactgaacaccttcttcagtcttccaatcttcaaactcaaccagagactgaaatggcccccgataagaatgtggctactcaatctcctaagaagagaaacaagaagaagaagggcaagaagaatcaggcccaagatgcggatctggtagcctccgaggaaccggccgatcaagagaatttatccaagaagttggtgcaggaccctgctgaagtgcctgtgcctgaagctattactgctgagcctaagcttgctgtcactgagcaatccgagactgagtatgttgaggtaccccacgagcctaggcctgagcttcaggttgatgagcctgcagtcgaagctgctcctgttgagttagcccctgtccagactgctcctaacctcgagattgcgattcctaagcaatacgaggctgagcttgccgaggtatcccgcgaactcaagcccgcgcttgaggttgatgagcctgtggtcgaagctactcttgagtctgcggccgtcgagaaggattctgttaagtccgatgttgctattcctgagcaacctggggctgagcctatggttgaagctactcctcttgagtccgttgcggccgagagtgctcctgttaagcacgatgttactattcccgaggaagctgaggctgagcctatcaaggcctctcgagagcttgaaattgagcctttggtgacaacgcctgaagttggcacggctcctgaatccgaggctacccaggacaccgcatcatcgactaaaaaggctaagcgtgacaagaagaagcagaagaagaaatcaaaaagtgcgtctacttctgacgagcctgcaggtgatactgtccttgctcggccccaggatgttacctctgcctccaagcagagtgagggcgagcagcaagacatcggtcttgccgccgaagagattcaagcaccgcctttgcccgaggatattgctccttccactgagaacacctctgacccgactgtgatcaagtctgctaccactgatgaagagcaagttcgaagccagcaggaatccggagagctggttcagcctgtggaacatgtgcccagcgaggaatctgttctacctgtttccgaagatcccagtttgcccatcgagaaagagcagaccccggagcctgattttactgacgctaaagaaagctcaattgccggtgcccctcaaccagaagtggaggaaatatcccgcaacctggaagagattgataacccatctactccagaggccccagtcgatagcaccacgcctgaaatcccccaaacacccaaagaagacaccgaaggcgaagacaacttcgaagaggccgttgaagaacatactccacagctcgccgaggaaaaggagcctgcaacggaacctcgcatcgacgtggctgcacatgaccctgtagacgcatcagaaacaaaggcagagaagcggaaaaacaagaaaaaaaagaatcgcaaatccgctgctgtcgaagaaactcgcgagactgaatcccagctagaaatccaagagcttgaacctgagcaatcagctggtgccgatcctgcggatacccgatcccctccaattagcggtgaagccttaccttctgatcctgaacatcttgaacagcccttcgaaaccaccattgaggagcctgcagctgcccaagagcagaagcaagttccattggaggccactgtggatgtaacacctgttgcaaccgaggcagtgggccccttggagccacctgatgaactgtcacagccaattgccattgaggttcagcctagcgccgaaaacctggatcctgctgaggggggtcctgacgaaatctcacagccttctactgttgagactcaacccgaaaccgaagttcaagtcgagcccgaagtcgccttgactacggcccaaaagaagaagggcaaaaagaataagaagaagggcaagcagagtgaatccatcattcctgacgacgagaagcctgctgaatctacctcgccggtacctgagattgaggctgccactgaggatatagccaagaaagctcctcttgtcatagaaggcgcactgttggatgcgcctccccaggagagcgagatagagctgcccatcaagttcgaacaatcgcttggggccgagccacttcccgaggctgagctactttccgaggttatgccgccccaggaagaagcttcttttgacccccttccgcaaccagcgatacaggcgacagaggcagagatgcctaaagaagaacccatcgcacccgaggagcagcccaaagccgaagaatctcctgctgagccagaggctcctatgaccgctgcggagagaagaaaagccaaaaaggcgaaaaagaaacagcaaaaggagcaggaagagagcattggttccattgtgaagcccgttgatgctgttcctgcgttcgatgccgaacccgctgatccaagcaaggatattgctccaactgcagaaattgatgacgctgttccagccgacttctctggaccggtttcttccgagcatgctcaggctgaacaggaggttgcgcctatacttacagaacccgaggcagctccactcaccgatgatattcttctgcccggcgataccgagactaacgaggcaatgagagacatcgagccccccgctgaggctaagccctcgatagaagacactgccccgtcgtttgagattgagcccgccgaagctcccgctaatgttccatttgtaccggaagaagccaccgctcccgtcgatatgcgccaagattatgaacagcaagacgatgttgtcaaggcagaggagctgaagagcgaggatgtgactctagcgcccaccgaagaggcctcggcaaattctccagagaccgatgcccccaagacacatgaaaagtctcctgaaatcgaggtcccaatgactgctgccgagaggaagaaggccaagaaaaacaagaagaagcagcaaaagcaagagtctgtgcagcttgaagagaagcctacgcctgagaataagcctacttctaccgaggagaagagtggcgaacaatttggcgacattttgcctgatcgtgaggccacaactactgctgaagccgttgcaggccttgatgagcctacagaacccgaggcagcccgtgaccttgaagctgagaccaagcctgaagaggaacaagctccggatgtgccaatcctcgattgcgaacttgctcccgagacacccgcagacaagattattcctataccggagattgctgaactagctattgatcttcgaaatgacgacaaagaaagcggcctagagcctatagttgaggtccccgctcccatggaagacccacagaaagagcaaaagcttgattcggccgtcggcgaggagcctgttttagacaagtctctcgaagacgagcccacagagtctccaccagagcctgttgtggaggagattcagtctacggaatccacagaaaatccagtggtggaggaggctgaaggtgaacagacggcatcttcttctaagtcgaagaagaagaataagaagaagcgccaatcagttgccgctgaggaagagcagcctgtacccgccgacgaagagtctagggctgcccctgccgaagaaaagaataacctcgcatccctggaagaggcgcctatacctatgctagccgagagtgaatccagcgagctcgcgctatctaaagagcttgaacagccttcacacgatagagacacggagcctgttattgtggtcgaagagccctctccagaagaaaccacgcagctagaggctgctacggatgtagccgccaccgaggccgctgcagaggccttaatgacccctgctcagaagcgcaaggctaagaaagataagaaaaagcggcaatcagttgccgctcaagagcagcagcctataccgaccgaggacgagtccaaggctgttcccactgaggaagaggttcaaattatacccaccgaagaggaacctacacctgtgcctactgagtgcaaatctaccgaacccatatcatctcaggagcctgggcagacttctcccaataaagatacagagtgtcccattttgacggaagaggcgcctaaggccgaagagccctcctcggaagtcacagcacaggcagagaccccttccaccggcattgagaccgctgaagagtcatcaatgcctcctgctcagcagctgaagggtaataaagacacgaaaaaccgacaatcagtaaccactcaagagcagcagcctataccgaccgaggacgaggttaacattatacctaccaaagaggaacctacacctgtgcctactgagtgtaaatctaccgaacctatatcatctcaggagcctgagcagacttctcaagatacagagtgtcctattgtgacggaagaggcgcataaggccgaagagccgtcctcggaagtcactgcgcaggaagaggtcccttccgatgcagccggccctgagaccgctgaagaggcatcaatgactcctgctcagaagcggaaggccaagaaagataagaaaaggcaccaactagttcttgccgaagaggaacagtccgtgcctgttgaggggtttaggtctgaaccagtcgagaaagaggtcacacctacgccagccgacgagaagcccccttctgaactggctcaggcagagctcactgaccctatgccgactcagggaaccgaacaacttgcggggacttctattatggcagaagaaacgcctgaggccgaagatccctctgttgaagaggtcgcgcagcaggatctccctacccatgcagccgccaccgaggcctctgaagaggcatcaatgactcctgctcaaaagaagaaggcgaagaaagataagaaaaagcgccgatccgttgtcgccgaagaggaacagcatatacctgctgaggtgcccaagcttgaatccgctcaggaagagcccactgtcgacaaagatgcgcaggctcttgttatgacagaagacgcgcctaaggacgaagaaccccccatcaaagacgtcacgcagcaggatacccctgctgagggaggtgctaccgagggcactgcggaggagacaatgacccccgcacagaaaaagaaggccaagaaagacaagaaaaaacaacgcaagtctgttgcttttgacgaggatgctactccgatcgaaggacccaagccaggtcaagatttatctacactcgaagacaaggttgaacctcaggatgctccggctgacttggttgtctctggagaatcagacaaggagttgccagtggccgaagaaaccaccaagtctgctgctaaaggggaaatttcagagatgatagaagaacccgcttcctctgaacaaagcaaagagatcaccgaccatgaactagtctcaactgctgcgcccgacaccccggtttctactgaaatcgagttgccagagcaggcggaacaatatgctcagcctccctcggagcccaagtcacctagtgcacaagagcccgaagttgccttgactacggcgcaaaagaagaaggcgaagaagaataagaagaagggcaagtctgtggacttagctgacaacgcccctgctgccacagacgcagcgcaggaatctgatcctaaatccgagcttattgttcaaacttccatcgatattccggctgcgaccccggatttgcaagataacccagcctctgagccagtacagctcgcagagggtctagagagtgaagataccattgacgccgaggctcccaaggccgaggaagtcgagccaacagaagccgtatcagacgctttgtcgaaagaggaaaccgctggcgtcaaggagaccgacaacgagcctccggggactgaagcaattgtcgatgctgaggcaactccctccgaagaactagaggccggtgcccattcttctgcggacctgaacgaagaagctggtatgtcagccaaggagcgacgcaaagctgccaagaaagcaaagaaacgccagtccaagaatgtcgacaccgataaagacgttgcaacatccgattcgccttttgccccgggaaccgagcctgctacacccattgaagcgaccaacagcgtcgaaaaagtcctcacttctacggacacagacgtccctggactttcagccatatcggcaccctcgcctgcgcaacatgacggtaaagaacatcagtcccacgacttaaaaacttacgacgccacggcgcaagatacggcctcgactgataaatacgtgtcttcgcaggtagagcagacgccgacagagagtccttttttagattatcctccccaacccgtgcttgagcgttcagttgattccggcgagttggtggagggaaatgatcagcagaagcgcgatgttgcccttgctgcacatgaacgggaggaggagatggttgagcctgcatctcttgaggaaatgaaggaagtgaatgatggtgagaatgttgaggagaaatcgtctatgccggaatcaggtgatatctcaatgaagaaagaaattgaagagacgtctgttgatgtgcccattgatgctgtccctgaggagacacaagagtctcgtgtgggggtggcttctaagacagctggctcgaagaagcagaaaaagaagaaaaacaagcaagaagagggaattgcagcttctgagcgcgagacctatattacagacgacagggagcagcttgaagctgcgcctttggttgagggcgagcatcagccggcaataaaggaaatcactgagcctgagcctattgccgaggccgaactagtgctattcccagagaagcaaccgggagatcactcacatgacatcgaagagattgtcgctggccagaaaaccgaggacgttgatgaaaccaaggatattagcattccacaagtcgagggcgttgctcctcccagtgaagcggccacgcagccagaggccgatgcagtcgccgagtccgctgaagaggcgccaatgactcctgctcagaagcgcaaggctaagaaggacaagaagaagcaacgccaatcaatccttgctcaagaatccgaacctgggccccaggctgaagaacagacagcatctgaggcggctggaacttctctccaagaggctgaggttgcaacggagtgggcacctgccgaagttatcacgcaagatgaggcttctactagcccagataagcctacagtgcagcctattgatgtccccgaggaggccaccaagaatcttgtaacgccttctcaacatactggaccgcatgttccaagccaagaaatcgaaggtggagatagctctttcgatctctcttccaccgagccgaaggtcgaggagggagacaagtcgcctgaggaagcttctggaaccccggcggacgagcaacctagcgcacaaacgccgcctgaacctgcccctgagcccgacggggaatcggcaactatcgctaagaataacagcaaaaaagagcagaagaaggccacggccgctgctactactgctgccatcaccgccacccctttcgagaaagaatacccacaatatcccgaggagccctcgacgatcacgcctgaagctctggagttggtggcagagcagcctatcgtccaagggcagcagccttcagagactgaggacaagcctcggtctgatgcagaaaagagcctagacgaaacaacagaattcacaacttttgagccgaaagaagatgttttgaagcagcctgttgatgctctcgattctgttaaatctctcgaatccgaggtaaggccggagcagtctacaaaagagccagcccaagaatcagccgccatcaatactattactaggaaaatgtcaaagaaggacaagaaaaatgccaagaagaaagccacacaagaagtaattgagccggctgtttctcctaccaaagatcatgttcctgccgccacgactgcaactgcagaagctgctcctgaaccagaggtgacttttgaggagacctcagcggaggttgttcctgccatcgagtctgcaactaccgaggctgatgttgaatcggaggcgacacttgaaaaaaacccaactttttctgagcatgagtccatttccccggaagaaacccaggtggctccgaatcacgagcctgaaaacaccgcaacgacggctcttagggactttagcatcgtatcagataacaagcaactttcagaaagcaagaaagatgaactcgtcttacccatccaacccactgacccagataccaacaatgagccccttcatctcgaggatcctgctgagaagaacgaccaagattatgaagcacacgttgggactgatgcagaccttgagaaaagagctgatctcgaagtcgtcgaggatcagcctggagaatacgaagtgatgtcgcctctgtccaagaaggtgtcaaagaaggataagcggaaggccaagaagatcgccggcatcaccgaagaagtttcgactcaacaacgggaagagcctcaggttgatgtggctgagttacccacggaatctgagatacagccgacagagcctgttgtggaaccggatacttccaaggaactggaacatgttgcagaacctcaccctgcattggagcaagggccgtcaactgaggctcccctactaattgaggatcagcctgtatccgggtctgaagttcaggttgagcctatgcaacccgatgaagaggccgtcgttagcgaggaacttcctctgtcacgtaaggccttgaagaaaaaggcaaagaaggcccaaaagtccaaaaagtccctggacactgagccaccggctaaaattccgattgaagcagatcaacatgccaccattgtgccgtttgaagataagaaccaggacacagaagcgcctggtgaaaagtcggctaatgacgaagactggccgtcgattgactggcaagcaaaatttgaagagtcccagcgatcaagggaagaggagcctgaacctgagccggacattcgaccttcagaggctgagattataggagaatatgttgatccttcattccccgaagtttcgcgagatgcaaacgaagctgcggaggaagataattgggctttgccggcgagcaaaaaagacgagctgcagtcacaccaagctgcttcggaagcccaggaggcttcactgggtccctttaacgacaaagagattgaacctcctattcgaacaactactccaggtggatctaagattgccaacttatttcccgacctcgagcgtgcgggattccgacgatcagctttggaccagcaaacaccgtcgctaaaagatagtgctgaggaagagacaagagcggacttggaagcgaatcgcgatatcgcgatccctgtctctgaagcacccctagcgaccactgaaaccaaaagaattggcgatgatttcgcctctgacctgcctagcagtctcgaaagacaaattgagtctacaatctcagagttgaaagctcaatccgaaagtcctgctgccacggaggatgaatcaatcagggggcctgaacttccgacgcatcgcgaaaattccttagatgcgtcattgccattgtcaatggaaccctccagtgaccggaatcgtaccgaggaaccttcttctcctacgcgccttccgcctggggcggaagccggagaggaactgtgtgagccacgccgatcaccatcaatccatggacggcaccagcatacacccaaaacatggagtttggaagaaccgtctctacaagctctccgtcccccttcccctcctcggtcgctcttcggaggaccgactgacgattatgtgcgaccccggactccgcttgatacaattgcggaacaagaaccacgggatggccagggagcgtccatggctcatcgcgggacgccccgcctggagatgaagcccgagcatgtcttacctcggcctcagacacccgtccggaagtttacagacaatgcctttgatcgagaggcttggcctacagaaaaccaaaagggcgggggttcaaaccccgatattccaaaaacgcctgagcaagggatatcaattctgaaacccagcaccagcagcggtaaattacgtcgtacaaatcgcagtgttagtggcgatctgcgggcggctagtcgagcgctagattcccagccttcgaatctcgatctcgatcaggtcccgtcttcctcctcttacgaccccgtcaccgacaagggcaaacgtcccctgcgaagtatgtcggatgtctatgtaagttattaatttatcccttattttcatttgcgattgcgattgagattgcagttgcgttgtcttgtcttgtcttggtttactaacttctccaggagggatggggtgagacgcccaactccccacggtcgcccagccgaccgcctagtgtccgtcgccgtcgcagcatgcaacatttgcaagacatcgaaacccgcctcgaccagctcatctctgaaaatcgtctactgatcgctgctcgcgatgaagctgaagataagcttcggaataccagcgtcgctcgtcgaaagagcgaccgtgcccttaacacccgcgacggcgatctgcgcgatcgggaatcggaggtggaacaattgaagaactcggtggaatggctgcagaaggagatgactcgtctgacccaagagaacgagggactgacggcatccaactctgcgctcgccgccgcccacgcagccgaggtcaacaccctacgcgagtcgtccatgcgcgaccttgccgacttacagttgcgacacactcaactctcgtcccagatggaggatcgagttcgacaagagatcgagtcggctcttgcacaaaaagatgttgaattgcgccgtctgcgcaccgaacttgaggtggcccgcgataaggtgaaggagctccaacaacaaatcgcagcctcggtacatgacaatgcccttgtcttccgggatgaagagtacttcgatgctgcctgccagaagctgtgtggccatgtccaatcttgggtcgtgcgcttctctaagcacaatgataagcgtcgctgccgcttacttagtgagttgcaggacgaaaagatcgcagaccgttttgacaacgccctcctcgacggcttcgatcccgatgcctacctatctgatcgtgtccgccgccgtgatgtctttatgtcggtggtcatgacgatggtttgggaatacatcttcacccgctaccttttcggcatggaccgggagcaacgtcaaaagctcaagtctcttgagaaacaattgggcgaggttggtccaactcgtgctgtgcatcgctggcgagctaccactctcacactgctatcccggcgaccggcctttgctgcgcaacgtgaaagtgacacggaggctgttactctggaaatcttccaaaccctatcgcaggtcctccctccgccgtctcatgttgaatcccagctcctggataacctccgcaagatcatgcgggtagcagtcaacctttccttggaaatgcgtacccagctggctgaattcattatgctaccgcctctgcagcctgaatatgatacaaatggcgatcttgcacgccaagtgtacttcaacgcagccctgatgaacgagcgcagcggtctgacgaacgacaacagcgagctcgaagcccaacagtccattgtgcgcatcgtgctcttccctctcgttgtcaaaaagggcaatgatgtaggcgagggtgatgacgaagtcgtcgtctgccctgcccaggtcctcattgcccgccctagcaaagacaagaaagtatcaaagatgatgagcggtgaccgcatgtccatcgatgcttccaagtcggtccacagcattgttcaaagtgttactcacagtgtggcaccgtcatctatgatggacatgagtaatgtgatctgaggcgtcacactccgatcatgattgctcccatcttaacatgcgtgcttgctgcatccttgctcttattgtctaatgatttttcttctcttctctcgtcaatgggtgatatggcgtccaggtcatctaacgtaacggtcattccaaggccaatgaccatgaatatgtggagtctttatgttcattttcattttcattttcctgttttctatttgattttctcatttgttctttcgaagacaatgtgccagcccgatgtgtattatcatggctttgatgtcttatgagtgatgacctgtacttctggtatggcagtgtaataatctatttcatactttattctttattctttccacttatctgtcttttacagtttatttcttggccctcggctagaattgtaagacttctctttttataagaatcaaattgggttgtccctcaagagcttctcgggtacagctccggatattacaccagctacctcttcaaggtaatctttttgaactcagcagtggtgtccctgatggctacttcaacaggaagtcgctccattgaactggccccatagaagccatgcaaaccctgcaccctgtctaatacgaatttcgcatcccctggagcagcaataggcccaccgtgacacagcacaatgatatctttattgatcctcaccgctgcatcccgcattgcctggatctccacaacacattgttccaacgtctttccagtcttcgccccaatcaggccagaagtagtcagacccatatgtgccaccaggatatccgccccggccttcgtcatagcctcggcatcctcgacgttgaaagcatatggcgtcgtcagaatatccaattcagctgcctgccgcaccatctccacctctttacaataccccatcccggtctcctccaagttggcccggaagttgccatcgactagtcccaccgtggggaagttctgcaccccggcaaatcccaattcccgcagttgcttcagaaaccgcgggatatccttgaatgggtccgtaccgcaaacacccgcaatcacgggaatattctgaacgatagagatgacttcggcggccatttcaaccactacctcgttggcgttgctgtacggcattagtcccgcgagacttccgcaccccgccatgcggaagcgaccgctattgtatatgatgactaggtctgcgcctccggcctcgaccgattttgcggaaagaccgatgccttatggtggattatcagtcaaactgatagacagaggcaaccgaaagggacaggtgacgtcaagtacataccggctccggctccaacaatgggtttcccgtcttcaatttgacggcgtagatgggcgaggatttcgctacgggaggtaggtggcgccatagtaagaaaatggaggtttggaggtttgtagtttgatcaattgttcatacagatcaaaatgggagggatcttcccaattatatgattcatcgtggggcggacttaatggagcgcggatgcggacgagatacacaaagcgcggagaccgcggacataagcgtagggatcactctctcattactgacagcaaatcattgagaaatggattctcaaacgccccagattaaggccaatgagtccgtcaatacattaaataatagaagatgaataagctatcatcctacaaccccatgcatataggagacgaggactaatttacttggactgccagtcaacatataagaagtccatcatatgatgtcatatattaattttatgcactttctatttcaatagataccaatcggcaaggatcaagatatacttcccatcgcattcataatcagatcccactgatcccaatccatgtccattggattaatccattgctgtggctcgatttgacgaaccagaccgggaaagccgacattctccaaggtgaatgcgtggccattactaaggtccgcgggctggctgatgggattcatctgtctatttgaattggggccctgtgagacagaattcggcaatccatccggtaccagggccgaggtagtcatccacttgctagatctagagagttgtccgtcagttctcattaagacgtatgtcacgcgcgctaggcaacttacagtatctggccgagaatcgttgctgtccgggtgcacagctgactttgcgcctttgacgcctcgagtcgagcatggcattcgtgaagcagtcgcacctcgttcaatgtacatggtttttggggctctatagaaagggcaagcaccaagacgaacgcggcgtggaaagcgtggaaagcgcctcggccacggatgtaccagtagaagggcatgaactggggcagtccgtggaagtctgcatgtagttctaagacgcgctgtgcacttttcaggcagcgatgctttgaccagctatgttgcggtagacaaacggtttcttcattcagtatattactgtggagaatgaggactaggtgatgggaaaaactgagcagcagatttgtatgaacaactgatgagctgtccccaagcatcgaggcgtaactctgctctagtgggtctaaatcggcttggatggccgcgtccaggcgttggagggttgtcggatcgtccggccgtgcagccagaacaggattacagatctcggaggatatctgaaaaaggcgcgattttcgaaccagatatgagacaggtttgatacctactgaggttgcaatgggtgctggttgtccctgtacgatgtcctcatcccacacctcagctgtgggcagaacacgcgacgagaacactgactggtatatatcaagtcctgtgatggccagattttggttacagagcagcatggtcaggcctagccaacagcggcgacgctcttcggtttcgacgatatccagggaaaacgtggccgggtcaacgtgacaaccgatcgacagcgccagatgatgaaccaaacccagaagagtccatgtttggccatgactatggtggatcccatatataaggttcagtagcgcctgtagtgttgagatgttgtgtcgccagagatagcgatctgcttcgaggcatttcatcgccgcggtgtaataccgctctgagagttccgtgactcgatcccaaggggtatgtttgcggctgagagtcttaagcaggaggctgtcattttccagtgcgagaacagccgtgcctaagatagtaaataggagagcaagccatgctagggagacctgatctggatccttggaaaattgatgataccgttcgtgaaacgtagggctatgtaagataggaaagagcttttctatgttaattttcagtcaacctgatgatagcggtagataggaaacctacgggcgcaatcgaatgaaaatatagatcctttaactggttgcaatactccgtcggtgggagttttgccaagagattaggtctgttttcagcatcgtgttcaccaaaaggatatggaccgctgggcgtgtcaatcatggcgctctcctggcttagaaatgggctctcttgagttgctcgactgaaaacacgccggccagaggtaaaggggaggaatcggacgtgtcctgaagtggatgggatgagagtgcccgttgtaaacgttgtcactggtcctaatctccgggtctcttgtacctctgaatccaattgaggaaaattgagcgaagatggtgttgtatctggctgttggttctttgcatgcaacagctgctctagcttttctatccgagctaccagatccgcatctggttctccggcgagaccttgataatgtggttggagagtggtctcaggggatgatgagcgattttccagtgggcgagcttgtggctgagactgctgcggctggcgctgtgagggttttctcctggtactatagacacattgctctagaggaacacggcgtcgtatacaagtgccgcaagcggggccatttcggggacatcggatcttgcgaacacggcacggctcacaagaaatcggaagacgctggcgtgggtggtgcgcggacatagtgatacgcactaatatatagccaaggatatgtaatatgctcgcggcttggctggacgaggtcgcagtcgaaggcggacatatacggagaaggcgggattgagttccactttgttttctccgcgctttgccaccaaatgatgctacaatgtgaggacctaaacacgcatctgtcagtgttaagttaaagcctagacatagtcaggtcattcaataaattccctataatcttccaccagctcattcaccatgccacgtatcatccttctggggacccttgacaccaagcgtgcagaaattctatatatctacaaccagctacagcatattgccacccgcttctcgacgcctctagagattaccttgattgactgtggccgtcaagccattaacgacgatgccatcaccataagtcacaccgacctgatatccaagtatgcatccggcgacagcaccgatctattgacccagccccggggacaagtgattgaactcctcatcagctgcgtcagtaagtgtgtcaccgaattactgcgaactacggaggttcacggaatcattggtgctgggggtagtggaggaaccagtctgatcgccgccgtaatgaggaacgctgcacctcttggccttcccaaacttgtcgtcagcacagtcgcgtccggggatacaggaccgatggtaggcgagtgcgatatcacattgatgtactcgatcgtggacatcgcgggcacaaatcggctcctccgtgaagtgctggggaatgcggctggcgccatttttggcatggcatccacatatcaacataggctggatgaacgccggacccgaagtctgcaggataaacagcgagaagagaagaaaactcgagtcggtattaccatgttcggggtgaccaccccgtgtgtggatcgtgtgagacgtcacttggaagagaactattctgtagaggtctacgtttttcatgcgactggccatgggggaaaggctatggaacgattggtggaggacggctgtctagacgccatcttggacatcacaacgacggagatctgcgacctcattgccggtgggactatgagctgcgaaaccagccgcctagagatgacactgaagcgcggaatacccaatatcatttccattggagccacggatatggtcaattttggtccagtcgacactgtgccacgccaataccgtgatcgcaagttgctagtccataatccgagtgtgaccctgatgcgaacctctgcagccgaatgtcgggaagtcggggatttccttctcgacaaactaaaccggtttgcccaggaccaaagtatggttgaggtgtggcttcctaggggaggagtgagtatcattgggacggtagggtcggaatttgccgatgccgacgctgatgccgcccttgctgacactctacgctccgggctaaagggcagcaaaatccgagtggtatcggatgagcgagatataaatgacgatggatttgcactagacattgcggatcggcttatggctctcgtggcgaagcattcttgcagtgtcatagcgagctagacaagtctgtcgttagttatcagacaagcagtgtatgcagtggctaggaatttgaatttatctatcgattgctagctcgacaccgacatgatccgtccaactttcacctgcgaaagcctaggctgctgtcaaagtcttgtataagacctgttgttcagctgattcaagactaggtgaagtatgaagaacctcaatttcaaccttgtgcttgttcctttgcctttgcctttgatctcattctatactaagttgtacggagtagttaactacaggcaattggattttatagttgtgctgacctcatccaccctgttttaggaaaagcctcctgggctgtcccatggaattcaaacagccagagtctcatctgcagccttggagggacctcggtatttctctttgtattggattctttcttttttcttgttgtacactttagaaaaaaactggactcgttcccacttcctatttaaatccgaattcaagactttcttgtccttgttttcttccaggaatgttccactctggctttgccacccgcgtcatcccccaaacctgagctgcagcgctgtcgaccatgccgatgtcgatttccccatgatcatccgcgctagtaagatcgtatggaaagctgggtatcggtatcctacatgctgcgagtcttagcactgtttgcgttggcctagctccattggttgatgggtgggctgctgaaaaattaacctccgcttcagtgcagttgctctgtaccggagatatccaacatcaatcgcaacccaattattggcgctgtcacaatggctccgcccatgatcccaacacctggcatagcggcctcccgaccgcctcgttcctcgcattcgtctagccgtccacagcacagcgattatccacccgacgctgataacaacgctagctatggcccaatgggcggcggtcgggctccagggactagtagtccggtacccgtctcggagaccacgccagccaacaatacccgcttcatcccccccgctgattatgctgctggcaaaccctccaagtcctccaagcgcaaaaagaaccgcaatcgcaaacgtcgcaatcgacaccagtcttttattccacctagccgggaggaatctcatgatattcctggggagacttcggatgctggaggtgttagagattcaatggaggccgaccggccaacctcgagggacaagtcgttcttcaaattgggacgcaatctgagtaacacaagcttggagagcgatgcgttgttagaccatcggtaaaatctcgtgatattgagcgatctcggagcttgagatagatactaatttttctttccgaacagggaccaacctttgatgcgacctcgtcgtgacagtcgcgttgcatcgtcattccggccgagctccctaacatccaatgtcttccgatcgaacgatgggcaatctcgcagcaccccgaggggaggacggggccaacaacatcacaatggtgatagtgacgaagaggatgccaatgatcggaccccattgatgcggccagtttccagtcacacgcccggcaataattggtatggaacggacaatcgcccgaatttgttctcctcacgtgctcgacagtactctactcggactatgtcctccggctgttcaccaaaggatgatcgcagcccactctattctcccactgtggagcgagactacgatgtcaacaacccgccgtccattcccgggtccccaaagctgggcccggagatgaattatgacgatgccgtggtaacaggagctgattgggacttctcgttagctcggacaatggagaatcaccgggagtctatgaacgccttgaacgacacgctgatcgacatagacgggaatggattgcactcacattctgcgccatcttcttcgcctgggtcgccgcttctctctcctcaccaagaattacggcggcgccggaccgtgacattaccagcacaggaagatgtatgcttccccaccgaaacgatatccgaattgggagacgagggagcgagacaaattcctgatgaagccggcgaacgtcgacggcgtagacaccggcgatggcccgatctctccgccctggaagaatggagccgtgaggaaaaagaggagcgcaatggagacaatcgagtcaaaaggatcagtgagcctatgctcatcgcaggccgattgcgccctcagtatacaggatggcgacgtgaagaggatgaggcgccttatcggttcacatatttcaacgaggaatttccgagcaccattcatgctcaaaccatctctgagctggtacagccaggtggtagcttccgcgatttgtttattccagatcctcccgaattggaagattcgtctgaagacgaggactcggaagaggaatcttttatggagcatgcagctctcaatcactcaaccaatcccgccaacaagccaatatatcacacagacaatcaaagtcaaggccaaggccatcaaacgagcgttaatccttgtatgacacctcagaccgttgttcccaacggaagaactgcaaatgaccctatgactggcaatgctcctccggtcagaggaccctcgcgtttatctgtcatcagcgaaggacacccagactcccaccgtgagctctcgcccgcaccttccaacaccccttttagcaaaacccccaatccgaaacctaaacgctacggtccacggccgactttctggctagatgtcctctccccgacagatgcagagatgcgtacgattgccaaagcttttgggattcacgcattgacgacagaggacattatgatgcaggaagctcgagagaaagtcgagttatttcgcagctactatttcgtcaactaccgtacttttgagcaggataccaacagcgaggactatctcgagccagtgaacatgtatgtggtggttttccgcgaaggcgtgatctccttccatttttcgcaaacacctcacccagccaatgttcggcggcgtatccgccaactgatggattacctgatcctcagctcagactggatttcatacgcactgattgatgacattaccgatgtcttcggtccgctgattcaagcgattgaaaatgaggtcgatgagatcgacgagatgatcatgaaaatgcactctgccagcaaggaggtgtcgtccaatgacagtgtgcttccttcattcgcaccaggagatatgctgcggcgagtgggagaatgccgcaagaaggtcatgggactgtaccgacttctcagcaacaaggccgatgtagtcaagggcttttccaagcgttgcaatgagcagtgggaggttgcccccaagtcggagattggcctgtacctcggtgacattcaggatcacatcatgacgatgactggtaacctaacgcactacgaaacgtaagtttcttacctatatttaaggctggtctatccaaacgttgaagtcgctgactgtgtcgtccagaatcctttcccgtgcacactccaattatttggcgcagatcaacatcctcatgaacgagcgtcaggaacatactgccgatgtcctgggtaagctgactgttcttggtacgattgtcctaccgatgaacatcatctgcggcatgtgggggatgaacgtgaaggtaccaggtcaggaaatcgatagccttacatggttctggtgcagtatgtatttccttttctttgccagatgatttgctaatacttcatagttaccgccggactatgcgtatttgcatttgtatctgtttggactgctaaaagagtctacaaaattgtatagacgtacaatgtgtccccatgttagtttctacatttcagtcgattggatcgataccctatattttggtttggttatttgcttgttgattttggggaccggggggggggggttgtttctttcttcttggtctcgggctcgggctcgggctctgagtaatcggcgtgttttttgttttgtgttgtggggggcggggggggggggttgtttctttcttcttggtctcgggctcgggctcgggctctgagtaatcggcgtgtcggttcttggatttgatatacgatgcatgtgttgctctttgctacatttgggaggttctcagatatacataggatgaacgtaactgtatattacttggaattgttccctcggacgactataggttatccctttttggtagcgtttaggattcattgtctttttggtaggaacaaagataataaggaacccctcgaagcgaccctatatatagacaagctgaataacaggcaactgttcgactccaaagaaacaaaaacagtttcatcttcactgttgtagtgaagattgtacacccaaaggcgaggctgtagcatgatcaagccattgtatttcccttacatgagtaattaattattccctgcacgctgcacgttttatttccattaattaccattaattaccatttattacaattcccggcgtcacccactggtcatcaacctcgagaatacaaaaccccagtgacttcatctcttggtttctgttcgattcatcctcgttccctatttcacctttcaatcctccctctcttctctgcttttcaatcacattcactctctttcccgagattcttctactggattctagactatccgtgtgcttccctgcagtgacccctcccttcttgacgtggaccacgatcattggcctttgccacaaacctgaccctctctgtcagccacttttcaccgaggttttggtcaccgacttctcttgcacatttggcagcccagccgccacgccagaacgcgtaaaaccagtcaagccaaaacgttgagccggatcggcgggtcacttttcgccctaaatccgccaaccagatcttgtcatcttcaattccttcgttctaggccttccttttacccttcccggcaacaaagcaaaacagcacaagtgatgtgtgtgctctttgcgctaccctgacccccggcccacttgctattctaaacaatatccatcacccctgcacctgctgcagcctttttttcgcttgtgcgtttctgtacagaacccaatttctggcaacagcatgtggtcatcggctattcgttctgctggaccctcacatgtgtaaagacccatattctgtgcaacatcttattcaaccctcgtgatatctcattcgcccttaccagcaacaactcaacctcttcgccgtcgagctttccctgcccgcgtgccgtgccttgctttttctgcttacccgagccctgtctctgcccaactgtctggctacctctcgggtctcctgacttgtctacgttgtgtcggcccattctgacgcgacaaggactatggctgcggagtccgagaggccgcctcaccctnnnnnnnnnnnnnnnnnnnnnnnnnnnnnnnnnnnnnnnnnnnnnnnnnnnnnnnnnnnnnnnnnnnnnnnnnnnnnnnnnnnnnnnnnnnnnnnnnnncggggggggcgggggggccgcctcaccttaacggcagctctggtctatccagaggcccgaaggatgcagagccggcgtcagaccctgtgcatcgatcggccagtgaaggtggcatgatggaacggtccatcgtcacatcccaggctcaacccatgtctcaggtgcccacgcttttttccaatcctacccctttcgctcccacgtctaccaccaactccgctgcttcctcccgcgaaccctccccggtccgacgctcctcacgtacctacaatccttcctcgcccagccgggtatcttcacactcgcgaaagaccagtcaagaccagtcaagtccgacccgacactctaacggtttaatatctggcccacctacaaactcatcaaccccgaatcttcaacgttcatcctcttctcctgtcagatcccttgttctctcggctcctaccgactcgccagccaatgttcctggtccggataagtccaatatgccatcatgggccgcgaaccgtcgcacagatctggattcgacccttccgaatacttcgcacaaacgatcttcattgccattggaggatttcacacccaagcaggaccgaaacacaacccggactgtggctagaggcgtcagtgggcaagggtcctcactagaaaccgtcgaggagatggcaagcaatccctctaccccatctagtgagacttctatcaagcctgtaatcgcggaggagtcacgattgcaccggatcgatgaagacccaactccacctgctccgcatcaaactttgggcagtggcagtgacagtggtgagaatcgaagttcggaaccgaaggaggaggctcgtccacaggcgtctggtgcggccaaaacacccaaaactctcatgtcacagcgatcaacaacatcactcagtgctggtgctcgcggaaagcctgccgacggctcagttcgcaacatgattgtggagacagagaccgttagttcgataccgcaggtctcaatgggagtgggaaatggtgagcgaggcagtgcctcgcgtgcagaccagggtacacttcgcatgaaaccttccaatgagacgattcgtccgcgcaaagaaaagaaaaagatccgtcgacccaatagcctccttacgactggccccgtaacaagcaaagcagacattttcgaggctcgagtagccaatgcagtggatgaggctgatgtttcggactccgacgagaccttcgtttacgactcaaacccgcctgatccgtatccttcgcgaccaccccggtatcactctcgaactcctagtgcgacctctatggcgagtcaagcggaccagttgggtagtcgtacccgagggttgcgagatgcttctcacggcgtgacaggcaaacgcagcatgaaatttaccaacgccaatccctacaacaacagcagcatagatggcgatggggtcgaagccgatatggcttcgcgctcttctagaacggatgggagtggaaccatcactccccggcatcacaatttgggtcgccttcatggacgcaacggcgtgcatccaaatcttttcgataacgacagtacgcactcgcacggtcaatctcaaaagtctccacgccatttcatcgggaatagctataggcattcgcgtcacagcaatacccggctgtctcccaactacagaactattagcggtgccaagaacagcagcgagtttcatgggtatgactacgaggcagagggtgcggatgacgaacgcacaccgttggtaggtacaccgcgtacactccatagtcggagtggtcgacggcccaacagtgcaagcctgcgacagatggagtacatggcgcaccgagaacgcggacttttcgctcgattcggctcctgcgctattatcttccttatgttgttgattgtcgctggaggagctacatcattcatcattgcggcaacccaaccccttctagatgtccaggtcattgcgattcaaaacgtgctggcttcggaacaggaaatcatgttagatttgaacgtgcaagctgtcaatccgaacttgttccctgtgaccattgacgacaccgatgtcaacatattcgcaaaaagtcgatatgttggaaccgacaagttttggcgtgagcatgatgatctggataatatcccacgcgtggagcaaagccgacgtcgctggcagctgtcacaagctgtgaagtgcctgggcaatatggactgtatcaagaaagccatgcctagcttctctggcccccacgtcaccggcggagttgacaagggcaccgatcccccaaccgatccagaaggcgatccgcgatctatgttgcttggccgcgtgttccacttcgattccccgctatctttcgaatcatctccttggaatcatttgacttccagttccaagggacagatacgtctaggccggccaggaaacaaaaccgaggctggaggtacagagcgctgggagcgaatcctccaacacccgtttgaattgactgtacgcggcatcatcaaataccagctcccactcagctcccgctacctctcggcatctatcagctccagcatcaaggtggtgcccgataccggtgacaacgatccggagcaaatacctccaaacaacggtacagtgcaaatttctgtaccacaaagaagtgcacaatccattcgccttccactcgatactcgttccaccgcatcggaggattcgagacgacctttcacggcataacaaatttagcgatagatcgatatcattgacttacgacagcctatttcgtgttaattattttttttttttttacttctttttattcttcatgtaacgcgacgaaaagcaaagagcctattgcctttggcggcccactctgtatacattatacagatacgcagtatggcctctatcttcccttcagacttcatcccgcagtataccccgtttgcaatttccgtctttttgtgctcgcaagccttggagaagttctatcatggatcaactctgtctaggtctcgtcttccctttccgtcttttctcttgtcttcgaaaaaaaaagctatctcggaaatggctctcttgtgttggtcacttccttcgttggaatggatgcatgcccttccatccattccttacatggcagccggccttacccgcttttactggaggttcttttccatgtctattcttcctggtgcgaagcatgctgtatctgtactatctgtctagtttctgactgatctcagaattggtcttgtgttatgtatctctttgtacagcgggactttgagaaagacatttttcgctattagctcagtcttcgaatatgagacgggttgggctttcttaatttcgtttcattttattacagggttccgcatctgtatttctttttgttcatgtcccttgtaaaaaaggatatgtatatcctttgattttggatacataactatattaattggttaaaagaacagatatgttaggtgtatatagttcaacttgtcttctgatttggcccatgacatccatggattcatttgcacacgccgtgcaagatccagttctacttcgaattcgctcgtagtttatgctgctcccctatggttttacttaaaaggatccgtaccaaaaagacttttcaaagtatgacctatattatcttatgaaaaaaaagcaataaggaatactctatctgaacacatacacatcataaatcattatcatcggcggcaggcatcattcataactttgtgaccaacaagattgagcatgaaacatcaaggataaaaaacaccaaggataaagaagataaagagccaaagagatgtggttaatgttaaaaaataaacttgaccaaggcaaaacaatccacctaaagcagaagaactagacataaggtcaaaggaatagacggggacaaagtgggataaatggaacaccacacagcgacccgctagaacagaaccttggtaaacctattcaccaggtcctcaaatttatccacagcgggatcccgctcgggaagagggcggccttgcccatcaaagcggctgggtaggtcgatggttgagtcggagtctgcttcaggggctttgttctggtctctttcctcgtggtgtttcggggctgatgggtgatgtcgatggtgactagaatcaggatagaaattgtgacggtctgaggcagtagaagaaggagggggcataggtggatagggcacggatgaggagcggcgatgatgatgatgacggctatcacggtcacggtcacgatctcgatctcgatctcgatcgtgacggtggtctctacctccgcgatgcgaagacgaacccgatccaacggtagagtcactgtcatcggtctcgtagccaggatcgtgcggaggatccgtcaagtcgaacgcgacagatttcggcggttggctaattgaccggggggcagacgttgggaatgggtggatgttcagacctatcgattaaggatcagctttgattacattctatacagtcacagttgtggtccgccgaacccacccttgtgtgcgtggtttgcatcaataggtaggggtctcacattgtcttcagccctacgcggccgatgtgtgtactgctcgggtcccggtcctggtggcgcagcgccgtaggcataaggctgaggtggcgcagcaccgggtggtggagggtagtctgctggattgtatgaagcgggggtgctgttcaggttgtaggttgagtcgcccgggggcggggggtagtagttggggttggggttggggttggggttggggttgctggggtagtagtgggggtcaggcatgggcggggcacttggggccgcctgcggggaaagcgggtatggttctggattgtaggattcttcataaggatcacggtgcacgttgtcgtcatgcgctgattacaccactagtcagggtaaatatttctcggtaggaatttgatgaagtggggacttactggagtgttcgcgatcgcgctctctggacttgcgacgctcgttgtacttgtgggcggcataaccgagacctgttgcgcctagtgcggcccccgcgaggtctcgtgagcggctgcgatgccgtcggcggtgaccttcgccgtcagaactggatgaactgctgtagcggactcggctacgactgcgactgcgactgcggggatggcgtctggggccataggcttcctgttcatcgtagtagggcgcatcaggctgaccgtagtaatgctcagatgggatgctacctgcgactgggtcgttgccgtattcgatcaggccggccgagtcgcgagttggatcgggataggactgtgacggggcgcggctgtgagaccttgagcgatggcggccccggctcgagccctccttttcatctttgtcactcttctgcttctcgtagagaccggtggcagcagcagtggcaagaccggcagccacaatgggaagagcttgtctcaggcgggatcgggagcgctcaccctttcgagagcgcgactggctgcggaccttttcaaccaggccagccacggccgcaccagccaatccagcctcagccatgtgcttgcggcgctcagacatgctgcgtttgccttgttccccatccttctccgagcgaccacggctagaaacccgagaacgggagcgagtgcgagaccggcttttgcgctcatcagcttttgacttgctacgcagtgcagccacaccagcagccacggctgcggcaccaactcccagctcgagcaaagtctttgcacgagagtgcgattgagagcggctgcggctgcggctgtggcgactccggccatgtctgctgtgacgatgggaagaacggtcatcttcaaaggaatgagaacggtgacggctcttactacggtagtagtcacgagcatgcgatgcagcactcacagcgactgcaccaagagccccggcaccaatagtcctaccaatacggctggcgccatggctgacttcgccatcttttttgttgtggtttcggagcaattcagccgcgccaacacctaccaatgcaccctctgcgagatggcgacggtggtgagggtggtcgtcataatcgcgggtttcctttcggatgtagaccatactgtcatcgctgctgtagtcctgatcacgatcgccgcggtggcggcgactactctgggaaacggaatcatcagggctcagctcacgccgggagcgagcttcgtcgtactcgcggactcgacggtgacggttgtaataatacgggtcctcgtccacctcagagcggcgcacgacatcatactcggattcacggggactagtataaatgcgggcttcacgaataagtacgggttgttttggggtggacatggtagtagcagtaggggacagctccactcggtccagggaaatccatggattggaagtgtggtcgattggtgtggggatgtagggtactcacaatcatagtctctctcatagcgtgtgggtggctcatactccacctctcgctcgtagcgcgagacggtcacaggctcttcacgatccgttttgcgccggatcaccacctcgcgctcgccgccaaaggagtcatcgtgtctcgacatgaagtctcgacggtcgtcttcgggagaaatgacgtaacgcttgattgacacaggacgggtttcatcccagtctcgttcgcgttctctgtaagtgtacgacatggacgtaataagggtagtgagaaatgggaaataattgagaaatgagtcgagaagtaaaagatgaacggcaaaagaaaataagatgtactgcagggaatggaggggcggcagagaagtgggggtgtgcagagaggatgtgatcgactaatggccgaagatgactccagtaggtacagtcctctcgggctaattctgattggtaacggttatcttggccaaataaatcaaagccaataaaagccggtaaaagcccagtgggtttgaataatgattcagaatgatgagagccgtccacaggttctgtagggcagagagcggagtatgtattggcacgcactcaaccggcttagtctcagactagatgatcggcaggcagcactatgtatgttggcctcggataactcggaatggggatttgaaaggcagatgataaattagtgaacaatgaggctgcgagatgaaaatgtgaaagagaggatggaggggagaaataaaaatggaaagaggtcaagaggataaaaagaccagacacgtgaggctctttctctcgggtttggcaatctttgcccgggtacggtggcgaaacacgcgaaacactcaaagaccgtggctttattttgtttacaacagactcacttggattgtttggttcttcccgctgcttaacccacgggattctctcggctggctcgggatgattccgtggtccccaattttatattgatcctacttcggtagatgcagcctcacctaaatgtcatctgctgcattgacgggtacatctaagaatggatcggcgctatatgcacacagtcatgagagcagtttcctgtaacgtttcagtagggcacgactggattagctacaatccacacattgtattatagattaatcttgatctcgggttagcattttaggttgccgttttaaaatgattattggggtcttagcaaagaagattcgttctactaggcgccctggaggtgacatcatatggggagcacaaagactatccccaataagagggcaacaagaggcgtataatcctgagcgccctggtcttgatttccgtatgggagccccgcggatgacgtcaatgtcatgcggggcgttcttggcaactaattgtttatgtacccaagtacggagtaggtaactacaacttatgttgtagtgaaggctgagtccatcatgtacttcgcccctggggtttgaacaataatggtataaaagaaagaaaaaaattaagtgggtctctctatgttatatgcagaggccaaaaaaaaaggaacagagacaagttacattgcgtttcctcctgttgaaccaataacagatagaatcatcgttggcagatattgagtcccgaggcagcgattgtaagacttatgtttcaagaccacgagtcacagatgacgacagcatcgctcaaaacgatgactggtaaagcctagactcgtactgcatatgctgtgttggcgaccagcgctaaagtcaggattcgtcacaacattgtttccttgctatttttacaaggccgtgtatcggcctttgtccaccgagaattttaacaattaaccttttgctcatcatggtatgagtggcgttagatataacaccccggtgtcttttaggttttgtcgaggttacaaccttccaaaaaattagcacggagtaggttcatatttacgatagtaaaggcggtaaaaagtataggccgtacagagggcttagttgtatctcagtgccagtacccatcgaccacccgatatgactagtaatacggtgatcaccgtgaccaaggaggaaatccactttcaaacgataggaaagtagcatccggggtttttaatacaacatacaatttaaattcgttggggatcaaatcatctggcaccctttgctcgcatctccaatccacctgacatgtacctgacagtgcgtttcttcaaccccgctatattttttagtccaggttacaattttagtttatgggaagtcattcaaattttcccttatcatttcatgagagaccccagcctagtgttagctagaaaccatctacgtgcgacagtgcgcaccataatgcacacagcagaaataattgttgaatttcgtgtcgaacagaattggctgtcaatgctagtgtcgatgtcatggattaccaatgcaaatatccttgtggggccgttgataagcctttatacataatgaacataggaacaccgtactatgctagatctccgtctttctaaaggccttaggtacaggcaatctgacaggggtatcggttcgtgctgtgtcctgaatgagatgctcgaacgaaggcgaggatccaacacgaggcgtgaaaggctcaaagtcccagaggtagcctagagtacgcaggatcgaagaagcagagtaagatacgacctcgccatccgagttaacgcccttctgttcgacctgacccttagaaacccacggcgagatcaagagcgtcgggacgcggccaccgagacggtcgaaggagaacgtatactcctcgccggagggtgctatctcagtgtacgtcaggtcatccgggcgggtagccagcgggggtgggacgtggtcgtggaaccctcctgtctcatcaaaggtgaggatgaatagtgtctcttcccactgcgggctggagcggaccgcgtcgtagacattcttgatgagggcttcgccttcagagacgagaccggttgggtgcatggagtttgtgcccacgccgcagcaggacgggtcaacgaaagagaattccgggagcgtgccggctgccgcatcggcataaaagttatccagggggactgctttgtcggagttcccactcgtgaaggtccagtcgaagaagtaggcatcgaccatactagggcttgtgtagtagttcttccaggtatggttggtttctgaaagctgctggaagatcgaacgttgggtgaggccgtggacgcctgggttgaaggcctcatcgttggtaccgtgaccagcggatgtgcctgagagtacaaaggcccggttagggttggtgggctatttatatatgttagctatgcgcgacaattagagagtaggaaatttgctcggacttacaccggggtgatccgaatgccagtggttgaaggtgaggtagttctgcaccagcgtggtcattaccggcacctcgtcctcgatatagtagttgatgacttgcttggccaggtacgccttgtcagcatcgtcgccatagctgcgtaactgctcatgcacaaagccatgctgggtaggagtgagcattccctgagcaatgtggtcattgcttgggatgaaagtgccataaaactcaatattgttcccagtcaccgagtgatcaggatcatccagaacagagtcaaagtccttggcagagctgcacacctcgccagctgaagtatcggtcaagttgtacgggttgcagaaagggccgttgttgatagggttctccagtcccttgagagtctggccgccgagtaggttgtccacagagcggttttccatttccaggatgacaacattcttgatcctgcttttcagattggtgatggaagatgaagaataagagggttgctgagcctttgcatcagcggagatcgccgctgcaaaggtcaacaatccaaaaagggcactcgatttcatcatgaatcaaggagacaggtcggttcaaagtctgggccgagtgcttgatttcgggagatctgaatcaagggatctgatgtctctcttatatgttgcattcagccaaacatccctagcattcctcggaacaatccaatctcccgttccacgtgttgctccggaacttacggctcgattgagttctgtctagagatatgggtatggggagtggtagtaatcaggctgcggggtcatatgaatcaacaatctcacagggcggggggtgaatgccaatatgaaatgcacctgattggtgctcttcgcatcgtccccataactcatatgtgattggtcacttaggattgattggcaagtacctcaatcacgtaaaagacgtaccaacatcatataattgttttacttcacgccattgaggccggtgatttaccagtactaagttaccaccacgccaagtattcgcacagactgcgaaagtgccaacgcatgaacaaatgaccctcgaaaacgaggtcacgagttgtttggctaggtatgttcgttgcaagcaatttcatcaatgagacaacatgggctttcccacgctagcatgactaaaagagcgactttgacaaggctcggcatacagagtcgattattgcaaaaggtaacatttgatgcttctggctgatctacttggaactgctaccgctttctggatttgtaataccgctcgttctctctcatttttaattggtgagtatttgaccggcagaatttggggtgctaactactccgtagttattgaccaatagtaaataagtcccatggcggctgtagtctcacgcgctagtaattggctgttaaccttaggtgatgagttggattggctattttgtagagtccgatatttacgagtcagtccatcctacatatagtgagtacatttccagggttttgtcctggaattctggtcttttgctcctaacgcagcgggttgaccaggtagcacgtgacacaatgtagcattcggagaatatccaaataatacaacatacatgtacaagcttgtatagatgcgggggtgaagtcttcgatcaagaataactcatctctatctgtaaagtatagatgtcaaactaactcacccttattgtatatgtacctgtctaggcatatggagatatctttttatatctaactttattataggcacttgatcatcagctatgtcttcgcaagggagaatgctgcatgaagcagggacaatatgcttccgaaagaggaaggtcggtatatatcacgtgttgataccttatattggcacgcaatgtttgttaagtatcaccacgcgatggaccagattaattgtatctatagactataccctttttaatatatgtttgatttttgaacccggggtacctgaggactcatccaacgtgactgtttagaagattccaattttcttcttacatcgataatcggggtaactgtcgatgatgccatctacaaatgtctccgccccgccatgaaaaacaattaataatcatatctggatttccaatctaaccgcccctcgtgcttcgtcgcttatatatatatacatcgcttattttttttttcaaaaaagccccttttgtttctaacttgtcacatagcagtatcctcgtactgtgaaatacattccctctcatccgcaccgggttcaacatcccactactcccatcgcgaggaaagcaaaacccaacaacctcgacatcacacaaaccctttgatataaaaccatcgacacacaaaacattataaaatgacgacagcagcattcagatacatcgaccgagcttcctacgaccctgatgccacagagccattcaaaaagccatggggcaaagtcgacggaccaggtcggtcctaccaactcacagaactggaacgaaaagtcgaggacctccgaggccaagaatcgaacttcacaacagacaattccggtttcgccttatacaagtcacccgcaaaggagaccgcattcaccgacgatgctgaagtgcgagcgggttactacccagaagtagaagacctgctgcgcaagaaactgcccggggtgaaaaaagtagcgatcttcgaccataccatccggcgccgggtgccgggctcggcgcgtagtcctgtgcagctggtgcacgtggaccaaacgcccaaagctgccgaggcgagagtacgtcgccacctgccagaggatgaagtagaggagctgttgaagggtcgataccagattatcaatgtctggcgtccgattgaaaatccagcttctgatttcccgttggcgctgatcgattggagaagcattgctccttctgattttgtcaaagttgatcttctttatccgaaggagtggcaggagcatggagaggtagcgcctgattctgagtcatttttctctacggatgggtatgaggtcaagggagagacttatgctatcgctcctaatcaggaacatcgtttcttttacgccaaagatatgacacccgaggaagtcatgttcatcaagtgtttcgattcgagaagccacactatgactgggggcaagacggatattgctcatgggtccggacatactgcatttattgacccgcagactcctgctggatcgcccgggaggcagagcattgaagttcgatgtctagttttctacgaataagccttggggttctcatgtcacaatgggtgatgcagtcaattcaaaaaaatataatgtctcttatgtagtttctaccctgtatatcatatcatcctcattatcgtgatttatgttccgaagttgtcaatgagtggggctcggccgacagtcactcagctcccaatggcactagaatgcgcctttgataagtagtaacattagaaatatacgtaaaaactccgttaaacagttaaaagatacgcagattacgaactaaccctgtcttggcaagattatgtgtacgacttcatgtgagtcacagaacatcccctctctatcgttttttgactcttcacatccactagaaattttcgacatatgtagctcgcatctatcgaagtgatctgccaatttatcaatttacaccaagtccgcccacggagctgcctagatagtgagccctaacactgatggcctcttctaccctacaacacactaacatctaccgcaggattcaaaatgtcctcttcaacatcagaactacgagaccaaccagaatgctggacaaagggagaatacgtagtctcaaccgacgtatcccgaatccctatcaaaactctaaacacctggtacgctggcgaagagttctactgggcaaagccaatgccggagtccgctttgcgcgaaacattgcagaactccctctgcttcgggctgtaccatgatccagaccaaaccttaagccagtcagtcaagacaccagagaacgacgcattggcagactccacaatcgaattcgtcggctttgcccgctgcgtaacagactacacaacatttctctttttgacggatgtctttgtacttacctcgctccagggccgaggcctgggaacttggcttgtaagctgtgtgcaggaggttatcgagacaatgccctatcttcggagatcgctgctgcttactagagattggaaacggtcggtgccgttttatgagaaggttatggatatggagcttatggtatgcaaccctcctgttgatgggaaggatgcggtgggatttgctattatgcagcggaagtcttggggggctcctggggttggagagaagccctaggtatctcagcggggttgagaatgggttgctttgaaattattacattataaatagaattattgtggttagagatatagctgattgaaactcttttctttccatcacttcattgctcatatgcctcatgacctaaatattaattccatccagtatgccgccaaaatccaactcctaggcccaaaccatgaaattcaaatagtcatcatctcatcacatatttaatcaaacccatgccctccagtaccagaccctaacgtatcccatggaacagaagtaggaccgatccaattttgaggatgcatctgaccgaaaccggaatgcatggtgtgatcactggagatcgatgcaatagttggcaccggcgatccggattgcgagtgtggatgcgagatgttatagctgtcctgcattgtcattccctgggggaggtttgacattgagaggggcatttggatgcttggtaggaggtgagcgtgggactgggattgaatattggcttggttttgttggagttggacttgggcttggacttgagcctgggcctgggcctgggcctgggcttggaggtgggattgagagtgggtaggtgattgcgggttgtatttcgttgaggcaacatcgctagtttgtatgttagtcactagtccaggggagaatctaggtaagggcggggtgtaacttggacatacatcatctgtcgaattatgggaacagccttgctgcagaagacgctgcggactgagagcgaggcgaacatatctaaggcccgatcgagtatatctttgatctcttcgtactcggactggccctcggggatgagcaggatgacagccaatgtgactgcagcgtggaacgcgtggaaactgcctagtccgctggtataccatttgtagggcttgaacgattgtgtttcgaggagagtttcaaaaatggaaagtgaagccttggcggaagcgatgcacttagctcttgtagagcaagtttcagatgtaatctcgccttgtaggtaacggcagagacttgggcggaggaggagaaggagaagctgatggatctggctgtatatgatgtggtggttggcttggtggtgaatgggtagaggattgttcgtatcgagcgtatagcgaacctcgaccatttcacggacggatataatttccgcttcgagttgagaggttgtgaagcgggatgtatttgggtagctgaatattgtttcacaaatcttcgaggagattttatataatcggaaattcaacaggaggtaggtcacctgtgttgggcgggggaatgttgaaggtgctggtctttttaggtttgggctggtgagcagatcaacgtcgtcgatgtctgcgggcagttttacgtcttgcgttagagcctgctggtcgaggctcccaaatgctgtgttttggatggtatagagcatcattagtccggcccagacccgtcgtcgctcttctcgctcgattggcccgagggtaaaacgatctgggtctaaatggcaacccattgatattgcaacatgatgtgtgaatcctagcattgtccagatcggtagaccgcggtgaattcgggcgtaatttataagaactaaagcttgtaatgagttgatcgaatgtcgggacatcacaccatcggcggcgaggcaccgcaacgcagcagatcgatatcgtgctgacagcactttgatatttcggctgaccgttcgctctcgccctagatctgacagtagaggatggtcatcatcgagcgcgcttatggcgatagcaagaatggcgaatagcaaagccagccatgatgtagacacactgccaggatcatgacagaaatgctgatactcggcttcgaacgtcagatcgtgaagaatatggaaaacctaatgtgttatcagctagcgttcccccatttctttcatatgacataccgaggaaaagacctgaaaataaacatccttgagggtatcacaataccggccaggtggcagaatcgacaatagctcagcacgggatatacttccattcctcgccaacgggatctgcaaatcatcgtcatcctccgcgagatccgaatctaaattcggtaaacactccgcggcggggctattcgccactagagactcccactgcgaagctagtggcacatagcggacatgaccagaaggcgaagtacgaagtgtgccaacattatccaacatggggccgagcgagtcccatgtctcaggctccgagaaactacccgctgcactcgtcccacccagtggcgagactgcgccaccagtgggcgtgccagcatgcgaggtcatctgcttctggagcaaggcttctagattccgaattcgtgctagcagttcgttctgcacagtgctgtcaccgggcgaggactgctcagttgagagccgcggctggccgaggtagatgcagtcttcagcgcctagaccgcgccgcacgcatgtttggcatggccggccgtcgcgcgagcatctgatctttcgtattcggcaggcctgacagctgatggggaggcgcttgcctgtcaaacgggatgaggccatagattgggaagtgaggtcaaggatgcgctggactgaagcaagcgcaatcacctcgtcgtctgaggggattggagagagtgtgagattatagagcgaagaggagctgcctctcaggaaaatcgaacggccggtttcaaaaaggggtacttcgcaatatatgttgtgggtatggatcgattggttgtcgtctgttcatgggtccataagaaaatagggaatgagaacccacaatggatgagcgggggatattgatgttgtcagagttgagataaacagcggattatcgcagtcttctatacttcagcccgatccaatttgtaataggaggcaaccttttttggggaagccacatggggatgcgtgtgaatattagcggcatacttatttgcccctgtcttggagatgtcggccgagcagaaaataataaatataattattaccaaaaaggtctagggttcgacagccctggaggtgacaacattccttttacggggagaccgatgtatgaaacccttctataagggtgggaagggtccacgatcagagagttcagcggatatgtacctccgatgctactaacaaaatacagtatagaccgtaacagaccaccgggaccgcttagtcctaatagggctttgatacacctataaaccatggtttcgggccgacacccatgtcggccctttgaggaacacattgcttagcaccgaagaaagtacgaagatactacgatggaagtgaagtgtgtatgttgtatgtgtacgataccatcatacgtggatcatagggataactcgttcagaccgagatgtgccgttgccactaaacggggctaagccactcagcctgccgatcatttccccttgcactcggcttttcgtaaagatcggcgcgaatatggccacgaggggttagtgtggctttcctcagccacatgcgccatgacgacaatccctgtctagcggtagtgcgccatacttagaacaaccctggagggactccataaacgtgaaaattctgaacttttcagctcggagatatcaatgtcagttctagtggttcgtgtgagcgttgaattgtttatttttccttaatttctataggacccacggagagactggcttcgttgtgattttaccaagaatcactccattttgctgttgcttagaatattcgcctgatataagatcatttaatggaacgcactagaatattgttatagtaaagagcccttcctgcggctctccaattccatattcccattgtgcgaaggatcgtctgtgggctcggaccctccctcgtgttcctgtctctcgggaatccgataactttaacgttcaactactttatacatagtcactttgcagtaaaaactgccggcttccaggttgactccggggcaatccggtgaactagctagaaaagaaagagccaaaaaaaaacactacatggacacttcaaaataaagaatggaagtcaaaccaaaagtacgtggcaaacagtcccggatatcgggaagcatctagaagagccaactgttgcaaataatcacccgtagttccggctattcctccggattgtgggttatgcagctttgatcatcggtagagatcatcccgacgcgtggcgatagagtttctgaggcaataatatgctgtttaggcaggattcgacaactatgtcgtaggaatgtcaatattatattaccggctagaccgacaatgacagcatgtaattctgcatactcatcatcggtcgaacggcgaatggtaaacggcgaattactttgtaagtctgatctgttttagttccccatgcgtctggtggggaacccaaggctgaaacgggggcaagacacgagctgcgttccacaagttcttgctttgctttttaatttaaatacttcagcccaacaattgtttctgggtaaattacaaaagccacaaatttaatatccagtcagaagaaaggggttggaattctgctacttgcaacaaagtgaagaatatttgaataaatgtgcacttctgggattacggttgagatggcatttgtataagcgcctggataatctccccgaagccctgctaaggcagggagttcagactgcctttgctgtttcatgcgtcgatacatggctagattcaatgtgctgtgtctcgccaaccacactaagtgcacgcttaggtccctcgtcctgagccacaacccggtcaccgaacgcagcagccacttcttcgagagtcttttgcttggtttccctggacaaggttagcctcttaaattcttttgatctctttctcttcgtctccgatgaaacaagttgaagggaaatatattagcgacttacgggaagtaaaagtaagcgatcaccaagaagaatgcagagcagactacaaagacgtagtagtagttctcgtggatattggcaaaagcactgggtccagcttcggtgactattttcggatgaagaggttagcaattgcatatatagactatctttcacaagaatagatttcaggcttactgccaacattaacgataaaatgagatgcggcggcaagacccatcaccttgctgcggagagcaataggaagaacctcggcgccatacagccaagtagtactgttgagcatgccatctaagaagaagaaaaacccccacgttagataatttcttgcagccatggtccgagtccttacaatagcaaaccacaaagaggtaaattccgagaatcgcgaaaccctttccgatgtggttgtctgtattctggaactctctctgcatcaccgcggcgtagatttcgatcaggacaataccagccaatccggtgatcagcatcctgtagacggttagcagcaggcatgcgacatgataacccagggaatatacttacttccgacgtccccattggtcggtcatgtacattgtagtgaccgaattggacaaaaaggcgatggtaccgtagactgcagccagagcgaggatcgtgtgtgacccgattccaaggcccttgtacagaatagctgagagatatattaacatcccaataattcccgcttcggcgctcacaccctgaactcactttgataatactgaatgacattgacacctgtcaaactcgtcatcgtctgcacagcgatagagctaaacatccaagttagttccagaaatctcaaatgcaaccaaacaagaaataaacaaactcacacaagcacccgatgtctgaaaagtttaaagatatcccgcaaagaagtcatctccctctccatctcatactcaatctgcgccttcataagcccaaactcctcctccatatcatgcaacacaataccacgccgaatgcgcgcaaactcgctacgcgcaaggtcaatcttcccctggcgaatcagctgtcgcggcgagttaggcatgaaagtcgaaagaccaatgaacatgataattccccaaggaatttggattcccagaggcagccgccattgtatggggccgtagggagcgtagctgcaggcgtagccgacccagttcgacatcattgttccgaatgagatgccacagccggaaataccgccgatcagaccgcggtatcttggatccgatatttcactcaggtagattgggactgttgcaaccaggccacttagggggatgttaatttcgtttatagatctggtgaagagtatgggtggcttaccctactgcgaacccggctagcacacggccggcgaggaacatgccgatgttgacggaggcggtttggatgatggtgccgattgtcacgatcacgcacatcatttgcatgaagcggattcgaccgagtcggtcgccgatgaatgtttgtgttagggcgccgacggcttcaccggcgatgtacacggccacaacctaagatggtcagtctctgggtctgttccgttggggtggaggttaaatggctgggtgaacatacagctcctgtgacgccatttgatggcttttgcatataatcaatccagctttggtgggcaatcgctagtaaatccttagtttgagttgcaaagctagaatttgtggataataactcactagttgtggcaataccagtatcgaacccctattcattgaagtcaacttcgtggttgtacacggtccaagaccaactgatcttggaagaagaaatcaacttacaaacaagaacgtgcctatagcagcaaagaaagcaatacccagcgaataccacatcgccatcttgaataattctagattctccgcaggatcagatagggaagagaagagaagagaagagagtacgtggatatccaagaactagaaacaagaactacccccggtatattacttgatctctcacaggagcaagccgggctatatccgatgggccgaggatgcattacacagcagacagacaagtgacagacgacacatacgcctatactcggaggagggccgaggaaaacaatttctggggaagcggggaaactggggtaggccgtggatacgaggagtctccactacaaagaacttttcagggccattggcatgttttgagccgttgagtctcgcaagattggaagatggctggttcgaggctctcgtttggtcccccagaatacggggttggtgtcctcggtgaagatctgcatcttcatatcacattctctcagtttcggtataacgactcccggtccgtatgaaatggaggattcttgagaaccgggttcttggcaaccccctcgagtctcgcccttcggtgttttctcgccttgattctgctaagctcggatggtatattttgcttcctttgggaatatacgtggactgaaatatgtcgcccaggaggaccttatcaagtgttcggggagaccctgatgattgtgcagagtgtagtccatcagtgactagtggtttccgaatatctctttgacaaaccgtcagtaagctaactagaaaactcgggggtaaatgaagcgaggcatgggactttgataagtctcacgagatactccacgcataagagtggacccataaagggagtcttggcaagaattggggggatatactttgtaacccacgccgagaactctacatggggaacatggggaatatttgagtgaacatccaagagcacaatgaacagcaacgcgtgggggataaagtgtatcaccgctgatgagggtactagcagctctactgtgaagcaagaataattattcaacaactcataatccggtagtcatagatggtgattttgaatagttaaattcctatttcatttttccattgccaatgtcatatatgctccgcaaaaacagcgaagcactttgtgcaatgcagaaaacccagaagccgaacaaggaaactgaacaatctagaaaacaagggcagcacccttggtcttcttgtcaccactgtaaaagaaaaaggcatgtcagcactgtatagcgaaacagtcaagcaatatgtagatgtaacataccccaactcgaagtgcttgcagcgcttcagggcgagttgcttcttggccttgcaagcagtacactcgagacgcaggacgaccttcttggtggtcttggccttcttgtggaagacgggcttggtctgaccaccgtaaccactctgcttccggtcgtaacggcgcttaccctgggcgaagagggaggcctaaatcacaaaggatgacatcatcagcgatagctcacgactaccattccggtgtcgagggcactaaccttgccagccttgtactgggtgaccttgtgctgttggtgcttgtggcactccttggacttgcagtacgtccggcgggttttgggaatgttgacctgtgcggagagatgtcatgagcttttgtctttctggtctgattgtgcgaacaagatcaatgtcaatgtgattcgtgccccgaagtccgattcgaaattagtgcggtcgcaaagagataggtcgtgttgtccagtttgtagttttcaaggagtagaaagtgcggttgaataaaggatggcggggtgcacccattgtgatctgcttcctgagtcctgaatttcatcacccagtgttgttcttgcaggtttcgccgccaatttcctcttcgatgccaacttttacattgcatcctgcagtgaatccggtgaaaaacagacggttgggtagttcataatgtggtgattcacgacggtcggcgaaggaattgacgatttcgaggttggccgcacagtagacatcacacattctctccacgactcgagcaacttcgaatggccggggcttgcggaacacttgacatatctcgtagggtgtatccttaccattttgactgacttggccggatagctgggtggtggtcgttggattgtcgcttgtcggaggagagcaagtgcgattgttgggttgtgggatttcactcgcttaggccctatcgggtaggcgctaacccttttaggagtcgccaagaagagtatgctgagtcatttataatgttgatgcctgaggctttactgatctcactgatctcaaacgtgttttggagtttggagttgattctcagcacacatcttgtattctgctatacaaacccttctccaagtacaatactatcccctagtccataccaactcctgcctttgatcaattccaaccccttctcatgacctatcacccattgcccttgagacgggtcccccaatctcctccacatatttgagcggagttcatgattgagatcctcgatcctatcaataagttgaaactttttcttctcaaattcttctggggaatccggctttatttctttggggccaccaggcgcaataaagcgcgcaatagtgatatgcgcagaaggtacggtatatctagccgcgattggacaaccagattcagtcacgatgttgtaaagatcgcttcgcagatgatgatatgtgaattgatcatgtttcccactataatcactgatatcttcctcgccagccgcgggaacaaagctcaaagcaatagcagaagtatcgtagctgattactggcttgaccaaccgggcacggtgggtgagagtgtagtttgccagctctgctacgaccccgctcatcttgagagaagaagtaatctcatcaatttcaggtcccctgagtgcagacctgatctcgagcgtggtcatgtgcagatgatgcgggggtacaagccagagacctgtgttgtagaatcacagttagaacagtctctttgtattttccatgggttatgcatcgcacacaccaggtccaatcaaggtaccaatctcctgctggatcttgtagaccaaatcccgaatatgctgtggcgggcgtgcccaaaaggcaaggttgtgtctcgggtcaacgtagtctgtcaaccccttctctgcctcgagcactttggacaggatatcatcctcgttccattcacagaatcctttctggcaaatttggcttctgaaaagggcatttctattgcttctatggacctcataggcaagttgcaatcgtttctgggtgggactctcagcatttggctgttgagaattaaagacttaagcttaccgggtcattctcagaaacagtgatcaattgctggaattgattctccgctttcgcaatttgcccgggttcattggccattttttgggggttggactccggttgactagtgaatcgtgattctagcctgtttcagcggggtagttggggtaaaactgcatgcacataagaagtggaaatctatactatcgactttctggctatcaaggggtaataatagacggtgaaaaggattatagttcgcgaatcaatcgctagtcagtaaatatatttttcttttcattatatatttctgaactctgaagctcaactcatcttcgaaaacggtgtccgaatcaaaaaaaacatagtaagatatctcatcgttctcaaaatatcctagttatgttctctacatcaaatcgtataactacatagttacattgtcgcaagccaaagtgaggctccgacgcaatcaggcaataaggccacaggcccccaccaaaaccccgccgggctcacatctcctctctaaacactcattgacaagagctgtacctccaactacattgcagccgacatataccttgctccattactactatccaaaccaccgaaaaaagccaccgacgcttcaatatgttgatcaagtgcgtttctcagctccagcatgtccataccattgcatcatcgaatgaccccaaaatgtgaaaggccactcacccctagacttgcatgctgacatttcgcgtccaaacagggtccgaactctcactggcaaggagatcgagctcgatatcgagcctgactacaaggtaaaccacccgccttgaggcatttccggctcctccccgcacggaaccactctagcgttctaccgaatcaacacccacaaaccccgctgcatcaacgccctctgaatgcgcctatactgatacggacggttctattcaggtctcccggataaaggagcgtgttgaggagaaggagggaattcctccggtccagcaacgactcatcttcggcggcaagcagatgtaagaaaccactcactcagttatttccccctactcgaacaaacccaagctgacaacttttcattaatagggcggacgacaagacagcctcagaatataacctcgaaggtggcgccacgctccacctcgtgctcgctctgcgtggaggatgcgctgcgatgttggtgtaacatctttttgtcatttttagataccacatttctgcagcaatgttaatcagttgaggaactagtgcttttccatcccgcatcccattttgcgaggattcgaactgcagggaccgcggcggagcaatgggatttgagcttaaatggaaaggtagttgcatactgggtgttctgggttgaatgattttcatttattaatgtcctcttttttttcctcaaggacctaagctcctttcatggactggcttggttttgctatacccatcttgacactacttccgggctttgtagatctacttcagtatattcgcgctatgcggcgggataaagacatcagtaccgcttactatgttttgaaatgaagccctgaaagatgttgtaaaatagcctagctgactgagttctgaacacaataggtgcgaccagcagccttggttgcactctccgaaatagctcaacttgagaaagtcgaaggatttccagtcttttgtacgcctaagtcattcgcattgttgaagagagggatatagcttgtagcattggaaaatcagggcccatatcaacctgataaacagagccggagttgtgaataagaatgtaattttagttaataccttttataaaaaattaccaccgagtgaatcgcaagtggggtgaatcccaccccgggtatcagaacgagcctagactacctatgtcccacataggtatatacgtagagggcctcctttcggagagcatatgagcatatgaatcaaagtgatccaaatatcacgataaatgtcgtcgctttgccggcatgaaaatgctcggcgccgggcgccgacgaataacgcccgggcgggaaagaggaggcccggaggaaggtgggcgggaggaggggagagaagaggtgtgagaggcgggaagagatgaagatgaagaagaataagaagaagagggtgtctcggcaccacgaaggggggaggtcggacggcccttcagcttaggcatgggctcagtggccacagctggcgacttctttacgctagacgaatcgccattggatgcaccacggggtgaggcggtggaggcggtggaagtcagtgcgcgtagtcgcgcctcattcttgccgagcatggggtgctgaagtgagggtggaagcatgccgggccgccggctgattcgtgggggaagaggttgcgcctttgatatcggctgtggtgccggctgctcggcggggcggcggtgttcttcgaccagaccgatcggtgcacgcttaacttgcgacgcacggttgttgagggacttggtaggcatcgtcagcgcagtgttgcgtttctgcggctggaagatactaggcttcttttcaacaccaccgcctatcctgcgatcatatggagcatgacgctgtcgcacagacggtcgggatccggccatgcgcaagcccttgctctcgggtatgagtttgggggtgaggagtgcacgctttgcactgatgccgtcaatcgccatcttcattctctccgcatcggcatcaagagaacgttggacttggtcgcggagatcacagtaaaccccataccagttgttggtactatccgggaggtggtacttttcccactcaggaatgtcccgtttaatgagctcaagccacagttcttcgtcttcttcggcgaggtggggggatgcgagctccataacatgctacagatttagaaagaatgatattagaagatgagcttgaaactgaaaatgaagcgcgggtgaaagaatagttagacagtgaggtctagtagacgtaccagcttttcggggttatggatattaagcaaaataggacgggcgagtgagtatggcatggcccccagattatccaggtctgaagatcacacatttagtccggagtcttgcaaaatgagagagctcggttcatctatacctttgatgaagcggatagccgtggctgtagccaggtgaagcagtgatggggctggcattttgcttatgacggcaatggttcaagccgaattgggtaccataagatatgcgacatgaggtgaaagcaagtactagatataacagagtatacgaggcgcagtcgcattcaaaagaataaaggacagaccaaaagatgccagatgcgacgcgattcttgtggttgtcgatggtaggagtctcggctttaaataaaaggatgatcacgcggtcgacgctgattggctgcgtcgattcgttgcttcatttgatattctttgttctaatgtttccaagccacagctacggactctactgattgaatattcgtaagatctgatgtctgctcaagtgagaattgatggcctgcatcatcaagatgcctactcgaggaattcaggcttcattttgtcgttactcgtgaatcaaccacaacgacgacgctatctcttgtgaatctcaaaatcaacctcgttgcccctaggattatgcaatcggcacacatatactccgtagcaaccctggaagtaatgtcagatgctttagtttatagtacagacgaaaccttcatttatccatttatacgacatctccagattcacaaagtattgggaggtcgctgaaatgccgaccataagctcttttccctttcgaagcagctttttatattccagcggcttcttgcattcattctgtagtgtctcggatccattgtcttcggaacttgtcgttgtaagcacgtgatgtccagcaaacaatgcaatcatcatcttgatagcatcatcgaggggcatttcaaagaactttgagaaatcgaaaatcagctcaccatatcactaaattctgcctcagatacgactcacaggtacgtctattatggtatctgtttctgccgtgatgctcgtctatatacacagtgcctcgaacaatggtaccagcaacgctagtcgtactgctatcattcgagcattccaatagcgtcgattagaacatacccttctcgtcatatggcgcctcttttggcaatatcatacaaggcctggactcgaaacctcggatacgtctgacccttcacacagataatcacaatggcaccccgttcgcagctcgagatcaccacttcctccgtgacccgcttggtcaaggaggaagcttcttatcacaaggagcttcagcagcaggctgaacgtatcaagaagctggaggctgataccactggtggcgacgagaaccgcgagtataccctgaaacaagaggtatgtgccttgtacatgagctttgcttccaccatatcatcttgcctctaatgctgacatgaacgatagcacatgtctcttgaagagaccaagaaggttctgcccacattgaaggagaagattgtgcagaccgttgcgaacctggaagctttgattgtgagtactacctatctgtattcttggattctattaaccaaatttgatagatcgaggagggcaaaaagggatcggacagcaacgttgagcaaatcaccgctgccaaagaagccattgctcaagccaagaccgcacagcgcgtgatttcgtgaaagacatgtcaattacatcagagcaaaaaaaaaatacccataaggtggaatgattccatagtatcattcaataaattgaagccatgcccaacgccggaccaaagaccagaactccttgctagtgctagtaatgtacatgccgaaatgcatcttcaggtagtatccatcttcccgctgaaatcgtcggggagttcctctccttcctcgagctcggataattcgccatcactaaccgcagaaatttcaccctcatcaagcatattggtatcctcccgtgccccatcgccctgagcagttgtgacttgccgcaaaggtgacgcagcaccggcagccccgggcttctgaacctgcagaccagatggccgaccggcatcgtcttggccgtgttgagagggggtcatggcatcgttttcaggtccaggaggagtgtttccactgctagccttgcccttggatgtgacatctccctcgtcgccgtcttcgccctcctgcatgccttcccggcgctcgacttcctctttctcatcgcggatcaggcgacgaagttgcatcccctcgtccacaatacgaccgaactgctcacggcgctcagcccaggtcatcgcgtaatccttgctttccttctcgagatctgcaatctccagccgtaatttctgaaggttcgccgactggtcttcgcgcggcttgagtaggcggttgctcgtgattttgtccgtcaattcgtcataggtctttcgcaaggagagaagtcgctgtgcctcttcaagctgagttcgtagatcggccgtgctttctcgtacagactgcattgtcgacagaatctgaactcgctcggtagcatatcgctgtcgttcttgctcgttgctggtaagaagaaattgcacgcgggcaatgctgccctcaaaggtggcaaagtcgagtgcgacatcctcgcgaaagtggtgccattcttcgagtcttttctgtttctcggcttctgttgcggtcgcatcggaatcggcgtcggtctcttcggggggaggggtgagagggagcgaggatcgcgagacaatgagggaatcggggttcaatagtcgttttgagattcgcttgaatggcttttcttcgacgttgaggagacgcgacttgtggagcgcatctgtaaaagctgggccgttaacgttgacctgggagaacagagctggagtggactcgaccttcttctggctggcctagcagcccgtatgaagccattttgtgtatctgaatatgaaattcgatctcagagtttaataaagcaggatatatgtattgaaagggtgcacggcttcaagctgatcgaagcggggagggatatgaaaagtgaagccgagcggtctggcacttaaactccgccttaaccttattgactccagttaatagccatgattcaaccagttgtgctgcataacaggagtaatcgactttcttttacatattactcatagcccccgagcttcttggctagagaccatctcaaacctacccagaatcgctcgcgtgcttacttgaggatcacgctgtactccgcaatcccaagctgtttgcaagcacgacctggtgaagccacaaccagagactcgatgaactttgccgcgcaagaatctgtgactgctgtcctagctactgatatctttctgtcctctgtacgtgtctcaggttcatcgctatgacggagatgtattccggcctccatgtgggccagcggttttgctctctagaagagttcaaaacagtggtacggagcatatcagtgagacaacactgggagcttcgtgtggtccgtagcaacaagaagagcgtggttatcggatgtcgatcatcggcaaattgcttctttcgtgtcgtctgtcgctcgaacaaaaatgcgacctacatcactagtcttcaagacagccatagttgccgtcggagtgaaaattcccctgaggacacgccagctcgctctgaagcttctcatgtgcgatttctgctgagtgagatcccgaagcttttcgatatgaagtcgaaaatacgagcccaggacgttgtggatgctgtaaaacgttaccatgggtatgacatatctctgcgccaggcacagcgagcgcttaccaaacttcaaccacgacatgctgagggccaggatgaacatgagctgaatatcgagatgagtacggaggaacgacagtcgcccgagcaatcccccgagtcgcaaggggaaggggtacacgcatatggagacatatctgagaatcactggctttccgagcatatcgcatcatcatcaattgatgatgataacgtgtccccaatcaagacccccaaaaaccacgtacttgctccaccatctagttcccaagccctgccatctccaccccaggtgccacacgtacatattcccacatcaaaccaaccctcttttaatcacagccaacatccaatgtctatacaaacaggggcacaatgtcagaccgctgcctctttaccagtaggaatggctgggcgtccgaaagactaccctgagcgcagtgatcatgatgccgccccccagatggttcttaccaatttcaagattgaattcacctgcacaacctgcgggtcactgaatcagagcttcttcccaaaccagggcaatgtcaccggtgccagctatatggtccatcatgctgtaccgagtcctggcattatcccaagacacgggtctactcaaaatggtgttggtggcagtagcaatgcagtcggcgaaatccctgcttacgaggttaatgcttccaacacatctaccattcagaatgcctggtctagtgatggcctaggggttcaaattggatcggcacatacctaaaatatcatgttaagaggatgacatcggccaccgtgttgctgatattggtattcattcttgcacgctacaacctgagccaacacgagaactagctgactttactcaatgtatggtatttgatgccttggccgttccggtctcagaatttctacacgttctatgagacgtcaatattagaagtttggatgcttaatccaggacacgatggcaaaatctaacttaactctgaagagggttagtttgatgagtcttttctgggatctctgttttgattttgaccctgagatctctatattggttcctcttatgccgaggaagtaatatccgagaatgacctggggctggacgatatcatcagggctaatattgttatgaagtcaacgagctacgccgtttaatcttgttttgataccacctttattgaggggcgaatcctatctgcttagttctgagaccatcggctaattgcattctgagtacgttccctagaacaaagtttcttcccccatgcagagctggacgaccttgcgcaaacccgctctccccaattggtaaaaacgagtagaccatggtgaaattttgaactacttagataaatttgtggcgatgttgatagaggaagagagctaggctatagaagctatatcaaagcccaacggcttgccttcgtcaaaaatgccctcggttatggactcgcaaagagttcagcataggcggcggtgtgacgtcgctaaaggtacatatgcgtctttcaaataataataatagtagcccaattggtcaaagtgaccacacaataagcgatcaagcagaaaaatagtggcgacacttactgcggagaaatatccggagataaaggcctaaattcctagattcggtaactagttagtcagccatcggaggtccgatcggatatccgaccccacggatccacaacagactctgctcttcgtcaaccgcaccgacaaaatgttacggaattgagccaacagtgtctggatcgccattcatcggggcgatattgggctacaatgaaaaccaggcacacagatactcacttgcatcggacgtggatccgatatgacatctgccagcggcgctcaagctccaatcgctcagttgccgatggatcgaaaggcactaaaatcctgccagggaaaaacttttcttatcaattgaatgactcttatatgaacagacttgccgtgggattattagcttatttctttaaataacattaggaccctcctcattccatacaattgtgcttcggatagtataacgccaagcccctaccaaccttaatatactccgtgtgcaatatcttctacacttcaagctccatggccttttacggaacatctcagataatctaagggaaattacctctttgagcaagcttggcaccgctacatctgcagccatgaatcgacaacgagaggccgaaaaggcccttcacgaccaaacaaatattctccccttcgcgcaactcatggttgtcttcacgggccttgcaatttccttgctgatctgtatggtggatcagaatggcatcagtgttacactaccaacgatctcacgcgagctgggtgcccaaaacaccatttcctgggctggaacttcgtcgctaattgcaaacaccgtgttcaccgtgctgtacggccgactatcagatatctttggccggaaagtcatgtacatctccgcattggtcttgctgtgtattgcagacctgctctgtggcttgtctcagaacccggctatgttctatgtcttccgaggcctggctggtgtcgctggtggtggtgttacctctctgacaatgattattgtctccgatatcgtgaccctagaaaagcgaggcaaataccagggtattctaggtgcatctctgggtcttggtaatatcattgggccgtttctgggtgctgcattcatcatgcgttcaacgtggcgcggtttcttctggttgatttctccattggctgcttgctctgcagtcgttggatacttcctcattccgaataatgcacgcaaagataacttccgtgagaatattgggcgcatcgactggttcggactgctcgcatcgtccattggtatcatttttctcttgattcctatctcgggtggtggatcctatttcccctgggattcaccgatggtcattagtatgcttgtcattggaggttgtgcaatcgttgcatttttgcttattgaatggaaagtggcaacacttccgatgctaccaggtatgttttgatccccccatagtagtaaaaggacatccagttgacataaaacagtggtcttcttcaaaaataaggtcatctctgcaatatttttgcagagctttctgtatggtgcagtctaccagtcaagtctttactatctgccattgtactaccagaatgcccgtggctggtcgccaattgcctctgcggccatgacatgtcccatggttgcggcccagtcaactttctcaattgcatccgggctatacatcacacgagtaaagcgctatggtgaaattatttggattggatttggcttgtggactttgtacgttgatcgatgcctaaatgctcttactttggtcccatactgacgatatcattttcatagggggtcgggcctcatgttattattcggtacccacacccatccggctgttattgcagtcattgtggcagttatgggcgccggaattggcttcacattccagcccactctcgtggccctgcaagcccattgcactaaatcccaaagagcagttgtgattgcgaaccgtaacttcttccgctgcattggtggttcatgtggcctcgccatctctgcagcaattctccaggctgctcttcgctctaatctaccaaccaaattcgcgtacttggcagagtcttcgtactcacttccttcaaaagcgaacatcagtgcaactgagtgggcttcaattctgctttcttacagcaaggcttcccacgcagtattcattctgcaagtccccgtcatcggtgtatgtttcctggcatgtattttcgtgcgtgacagaggtctggaacgaccgaaagagccggaagagcttgaggaggaaaagcgaaaagcccaagagagagatgccgaggcggttacttctgaatatcccgaggagtgtcttgagacataccaccaggtcgagaagcgccattctgcgtcaacattcgccgaatcatccatgccgccttcccgggcggaacctaatactgagggatatggggagaaggagcagcattgaggcatgtactaaagcatatagggatctaataactctttgatttggctagatctggattttcttgggtggcgtgtgataccaaaaagcaaaaattttgtatagtttacgatatattaatataatacgagcatcaattggcgcttatgattgtccgagctacggagtcttgatgtcaatattgctatctggtaaactggaagttgtaagatgtgcttctgattgcttcaacccttcgaaatatctcttttatcacaagtagtaaaaccgcagaaaacaaagaagcaaaaagttcgggtgtttatcctagacgcctcgtaaactataggctagccttgatactaggagacgtcttgtcttggcattccgatccaacgacatctccgatctctttcaatctcaatcgcacctacaatggcgcttcaccggcatcttcatgttccaaattaaagctgatattttccagcaaatccgatatgtatgcgcccgggcagagctccgagtcatcaaggcagacaagtcccgtatcgcgagatcataacccgcggaaacgcgggaggacggcatgcactcgctgcaagacacggaagcagaaggtgagttccaatcggtaagatgactacaagtatctcgactaacggcttgtagtgcgacaacgaatatccgacttgttcgaactgcttgaaggcgggtgtcccgtgcgacaagtccagcgtccgagaggacaaagaccgtcagaatgagtaaggtccaagtatatgtagtagccgggaaagaactaatttggataccagttacacacgtggcttagaggagcgtgtactgtttcttgagcgtaaacttgtggagtcggatcgatcatcagacgggaataccgctacatatacggcgtcttcgctgttctctccacaaggtggtaacacaacgccacacacagctacctctggatttgacaataaccccgttggagaaatcgtgggccttcttgccctgagcggctctgaggcccctgcatacgtaggatccagttctggtctttcactcgctgccgatctgggagagatggtccaaacgagtgtatggaaccaattcatctcaagaatgcaacataaaactaccgccgccagtagctctcgaagtaaggctggccaagcacacgggccctcggagcagcccagcgccactcaaattcgagatcggacaacgagaatggaagatctcttgccggcgaatgttgaacctccaactgatgagatgggggcaagaatactcgaaacatatttcacccgacttcattctcgatatccatttcttaataggaaacatgtatggcagattcatggagatcgatggcgattagcgaagatcaaacgtgaggaccttactcggtctgatcgatttgctattttcaaactcaacttggtctatgcaatcggcgcaacaatgcttcggctgagtgagaaatatgcgtacacgactcccgaggtaatcatattcattaagcgttaagactggccgacacttacaagttttagcgattctatactgccgccttgcagcatgttcccacgatgtgtgaagcacgatcgattgataatatcgaggccatggttcttcttgtcgtgtaccacctccgaactgcgtccagtcatggaatgtggtacatgattggacttgctatgcgtactgctatcgatctaggtctccaccgaaaggcaaatgaaagcaatctggatccatttaccactcagatgcgacgaaggctattttggactgtatactatttagagcgagtggtatcaatgtctctcggtcgcccgttcagtatatccgatcgtcacattgatcttgacctcccactagaagtggacgacgacattgaagaccccacactactcacagcacccctagatccaaacaagaccacaactttgacattcgcaatttacctcttcaaactccgtcgcatcgactcccgcattcaacataaaatctaccgcgcagaccgccccctatcttctctccgaccaaaaatggaccctctatacatcgaattggaacaatggaaagaatccgccctattacgattcagcggtccagatctcgactacccaatgctgcacttcaaccgagcagtccgactactaatccagccattcctccccctcctcccaatcacggacccatactaccaaatctgcatcctggcagcaggaaacatatgtcaatcccacaaacgcctccaccaaaccctggagtatggccactccttcctagccgtgcaaacagtcttcatggccggaatcaccctcctctacgcgctatggacacacacagaccaagtctggtccgtccgcatgagcaacgacatccgcgcttgctcaacagtcctctttgtaatgggcgagcgcgcggcatgggtcaagaaataccgcgacgccttcgagctgcttgtcaatgccgccatggagaaattgcagggcaatgagactgcccgcaatgccggaatggcggagctgatgacggcccagtatgggattaattggaattctactactgctcccggcatgtcgggtagtgataagttccccccggtcaacccgacggggctggctccagatactgcgggtgctacgccccagccgcagggttgtccggctgatgattccgagcacgcggttaggatggcgttgcagctggcgccatggattgatcaagatgagagtgatcctctgtgggtgccggactttgagactttggagaatctttctgggactttttggagtcatggtgatacgagactctttgactctatgtgatgtctttctggaccgttcattgtgcaactttcctattccttctattatgcccatgcgagggatggaatatgataccctatattatgatataataggacagatcgcattttctaagatctgcccatcatggcgtgggggcttttccatgcttgtttcgtgggacttatcgaataataagagttggcaaaatgccagcccctaccccaattcaccgatgaggaaattgagccagtaatttgaaaatacattcgacgaccgactcctaagctcatttctatgcttgtttggtgtctggtggtgttttgcgaagtagtcgaccagcatcagtcagtctggtttatggcccatattgcatgtttttgtagaggaatttacgttcatgatgtgttcaaggcggtatatctgtgaaccaacctgcaagatcaggcaaatcaagtctcccaaggaatccaaactcttcctgtcccaaacttatctcatcccaagatgtaaaaggattgaattccatgttattgggttcgtgacggagattgtgttcgtctgatatcggctcagtaggctgcgatgacaaatcaagtgggttcagttgttgattgtccctttggtgcagctgagtggaaactaacgaggaaacaacaccaggccgacaagtagctatacaaaaattagcctgtacccagtgaagatctattactaaacaacaaacccgagtagttttgcattatatgttggtgcgtcacttgcaagaactgcaacgagttgcgggcagagagactgaacatggccataaaagctaagatctcttcgcacttgcgccaactcgcatccacgatttttgaatctacctgctccctaattgaatggcaggaatatgacattatcaggatgatccctgcagtggatgtgtctagcagatgttagttgacgatgaataacaatgagtggaatcgatcacgaacagaacccattgtaccaccatgcatcagttacgcttgttcgatatgtctcatgaacaagtgagaccagatctatggctgccatgacgcatgaggaggcacatttcgagaagactgaggagtatattatatttttctcgccgagctgtacatcagagcggcgtgatgctcgctcatcggagcagagttgagtaaacatggggcgatacaatagaaggcggaggtgaatgaatctaatttgtttttcttttagtcagaaattgtaactcaaaatcctagagatagaaacaagttacctcgcacgtaacacattctgctgacgcttgaaggttgatgcattgccaatgcctgagcgatgcaacgaaggttcatctgtccaattcaagggctggggtacgttagcctcataagcagcaagtttgtcgtcgagctccatcaacacatccaggctacaaagcttggagcttcgcagcgaactagtgcgagtgctatttgatcgactctgccaagcgttatagacctcggatagaatagactcgagaattttgtataattcaatagttgaaatgtggaacgtcatatatcccagcttatgatcgcagggttgtccactaagctcacaaggatcagcttcttgggagtccgttcccattgcaggcagaggcaacggtgaaatatgagaggtcatgctcggtctgccatgtgtcatgctaacaatcctaatctcatttgttagctgtgtgtttaaaaagaacagaaaagcgattgcacaaacatatccataatgacgcagctatgccatgttcgccgccgtatttctatttccagaggcttgttcgaggaatgtatgattgtctcgtgtaatccgagtccttgaccagctcgacacgccattccaactgcattccagcaccgattcggataaggagtactttgaagaagaagtgaaacaatcagaaacgtttgaaccacgccgatagtacttatgtccagaagatcaagattcacaaatcgctttgagcgaaggaaaaatgaataaaccgcagcctcccgatccgcaggcggaatatccgagaaatagcagccaatggcaaagatggcattgagtgcacaatggaagacaattgaattaggaccgcaatcaaatgcgcccccgagtccaatattgagctgtggcaactcaggcttggatgccttatccgattcccagagatttttatacgcttgctcaaaactagggcgatggaaaaatggaaatagacaatgtactctgtccaagtaacactcaagaagatggtctgccagagatcgagggggcaaagagaagtcgtcgaaccgaagatctaccgatgggtggcctatatctcgccaaatccccttatcagagccctgggatcttgacgattcactcttgttgcctcgcaaagctgacatatatgactgcaatggcatcgactctcctgctagtcgcataaaagaggccactgaagagttcccatagtattgctgctcctgtggagagtctgtgcctgggtcgtcttctgcgacagatattgcacccatggcggtgacattaccgtgggagttgagagacggcgaagcatatatgctgcctgctcgtgggtgggcagattcaggagacagatgtgaatgtgccgcatgtggggatctatagcgctcagcttccggtcgattcctcggcgtggggattcttggcggttgaaaagtaggcgttgaagaagacagaggacttggtccagatggcacaggggtggatcccagtcctagtaatccttccgcggcaacagatgcccttgattctacgtccagatccatatcttcaccgacaaggctttgacttgcagatgcccggtagtttttatgttgcgaaggcccaggtggcacagcaaccccgcctttcgcgcatgttgcttcaagctctcgaatacgatcatggagaatcttcaggtattcatcattgctggcggaccttgcattatccagcttgtaaacacattggtcaacagtatacgagcgtcgagcgcaggggccacaaattggcttgataccatcgcacctgacctttttatctcgacaagactcgcaagccagggcaatcttgcgacgccgcggtggctcccgtttattaattccacctttgggaggcatctgttcgacaagttgtcctataagccacagctgagtgtatgtgtgacccacaatattgctggtacacaattttattggtgacccgggtggtgaccggaagagaggagagaaaagcagtggaacaatcccgagactgttgttgtccggaatgtacccggacatatagtcacgtgtcataccccgcgaattaggaaaaccaaacactacgtccactactccgtagttacaacagagataaacacgccgattaaccctgagttgctataattggagtccttggtcagaattgttagaacggacaagaggaaggtcctaccgacaacgagatactgctaccctaatttagcttatttgtgtcccaattaggggtagtgattgtcggtgtcggcaggacctgtatcagacgtggagcgggatgcacccggtgtgtgctgagagatgaatagtgaaagtaaagaataatagtactactactccatcaatactccgcaaatatgtgcatatacaattaaagagcatagagaaaaatacagtaagtcaaattaggaacggatgtttcgtagtagaggacgcggatccgcaagtactatcccgggtgcatcccggaattgacgagggctgcctcattattaacgaggaaccttgcttgactgaaatattaggagaaatttgaccctcttcacttcctgaggtctctctttgattaaaaatccaaaatcaagtactgttacatcgtcttccacagaatcctaaaccaatatctaaaacccaaagtacaacatcggctggatacctgattatctttcacaattcaaacagcccattaccagtttggtatttaccacatctccgaatggaaaacgccaatcagacgattcaaaaggactatagtactctttcacattactgtccctggcaagacgacagacctcaaccaatctcccgagaccaatggcccgccgaagaaggtctacaatggggttcagatcccagtttctgctatcatggcttctctagtcccataggtacatggacagaggagcgcctggtccagaacctgatgcggaacatggctggtttgtgtaccgccatggacattgactttgatgttcccgaaagtatacatgagccatctcagaagaatctatcggaactggatggattcacactcccaatatttcagacctcgatggtcccacaaaatggaagaccctccgaaaccccatcgccatcttcatcctcgagccaagcccaaatgttctctttggatgatactgaatgtacacaacgggcgagctgtgtcaaagccagaacccagtccaaacaaaggaaaagaaagtgtgtgcaaaggccaggacagaatttatgccactgccgatcggaaaagaagaggagagagatcattggagatcgatataaagaactctgtcacattgtgccagggcttgagagacagtcatacacgagaaaatatgttctcgaggaggctgcactgtggattcaaaaattgattcaggacaacgttgcccttcatcaacaactaggggagttgaaggaacaggaaaagttgactcagttgaggttatttcctgtcgagaaagacgaacaggtgggctgctagtcctagcattatttttatctaacaatactgtcaatatctgcgcatgttcatttgatacctcacggaaccgagcactatttaatgtaatatgattagaggtctttcagtagtttatgttcgtgctatatttataccttaaacgccaggccattctctatctcactggtgttagttgatataaagaggccaacttctttctaggtttactattcactcttcatctctctctttgcctcttctttctcatcctctgtatattgaatataccatgccctagaatttcccaagaacatccatggcttagtgcctaccaaggaggagcaatggcagcaatccctttacccaatctctgaatttgcgcagcatagtacgtctaccaaactcgttagcaaaccgcctaaagcacccaaaagcaaaagaaaaaaacttacgctctcagccccagccccaataagaggcaacggcaagaaacgtgtataccacggaataggcgccttattcaagggcatccgcgcctcgtcgtcgccgacactctcatcaagcaacagacgcgggaacttcggatcaatagctgcaggccgcccaataccaacaagatcacaagcattatccttaatagcagcctctgccccagcacgcgtgcggaacccaccggtcaacataagcacaagctcaggatggcgctgtcgcacctccttcgagaactcgaggaagaaggcttcgcgcgctgcggtgcgtgacgattctggtgctgccggattggctttgccgtagcccatcatctttgggtcttcgtagctgccgcctgagatttccatgaagtcgatgccggcttcggctagaagtgcgatttgcgtcattgtttcttcgaagattgtggagctgtggtcggctgagtttagcttgatgccgattgcgaaggtcgcgggtacgactttgcgtgtttgagagaggatctctaggacaaagtgggcgcgcttttcaggtgtgccgccgtatgcatctgtgcggaggtttgtctggggttatggttagtattggtgttgggctggtgataggggaaccgagtgtcataccttgccgttgaggaattgatctaaatagacgtaccattagcaaagaggttatacatttttttttaaaaaaacttaccaatcaaatacccatgcgcaccatgtagctcaatacccgaaaacccagcatccgccataagtctcgcggtatcaacaaactgacgaataaccctttcaatatcctgagttgtcatctccttgggctgggtccagaccaaacacccaatcagcttctcaaaatagctatctccaaccttcatgggcacggcgctgggcgcgagtgtctgcgcgaatattccgcgatgacctgcaaggcggaaggactgccggcctgggtggcagatctggactatggccggcgtgccgtgcttttggcaggtgtcggcatatttcttccattgcgcgacgagggagctgttggtttcgctgtccttatattcgctgtgtagagcagggtcaaagggactgcccatgtggttcacgtcgacttgcacgtttcctgctaagatgttagggttgggtgtcctttgggatatgttttgacagtctaggtttcgcgtttggcatagaagtttcgaccacaaaatgggagaattagaccttacctgtaagaatcatcccccatccaccgtccgaccattgctcatatgcatcaaccagggcgtttgtcggctggttagttttggcgatcatctcagccattgcggcctgggagatattagttccatttgtgcatagccgctaggcgtgaataacgtatgtgatttgtaccttgcctagcctattcggcagaacaagcccacaagggagcttgacggggtctgcgaggggagatggcatggcgtatatgtatcgtatgcgatcaatatatacagtgtaaggaattcagtctaatgtaattggcgatatagatgaagtctaacagacacaaaacacgctgttaatgacgttagtctcaatttgctcgcaactcaaaacgcacacatacctctattccagaacaagaatctgcaaaggaaggacaacagacactttcatcaatttgtaactaactagttaatgagaattagctcttagtcatctcgcggagagattgatctccccgtctcgcattgtggagtcttcaggggccgaggtccacgttgaagaaatgtggattgggaaattcggggagttgggttcatccgtcctgaattttcgagtctgcttggtatatttgacgctcagtgaggaacgccattactaacttagactggaacatgttgcgacctctacaggtgttggcgtaaagttgtgaacaagctaaatagtaggataatagtaagtgatattaaattttgttcattcatatggcaatgccagcgaaatgctaactattcccaagatgctaagacccccaaaatgcgagccaaaaaccaaaggaaataagtgttgggtattcaatcaggggaaaagaagttcgtgtccaacctgaaaataggcagagaagaaatgtaagaaacgaagtgcgctcgaaaccaacaaaagacaaaaggggggaaatatcaaaagtcaaaggtgacatgcgagtccatcacgcagagatcctaagcgctgacatattcgaacagatgcttttttttctgcaaaatgcagcatgcacagccaagtctaggacaaaaacaaaaagatcaaatcttacaacttggcattcttctcctcagttggggagccagtcgccgtgatgggtggcgagatcgttcctagattagagaggaggtggccgacctcgctctccagagcacggacctctgtgtgagggtcatacatgcgggccttgatccagttgtccagctcggcgtcgcccatagagcgcagcgcaatctcgcggtccaccttgtcctcctgggcagcgcgcatcaccttgcgggtgacgacgacactgacctcgcggatgcgggtgatatcggggtagagcaggccgcgctcgagctcctcgccggtgagggcagcggagagggcctcgccagaggcgtagatcatactgtctgtgacgcggacggccttggacaagatgctgcctaggccgataccagggaacacgtacatgttgttgccctggccggggtagtaggtgcgggtctcgccggcggagttggtgaaagtgtagttggggaagggggagccggaggcgaagaggcagcggccgtcggtgttggcgatggcagtctcaaagtcacactcggactgagaggaagggttggagagggggaagatgagaggggcggtgttccagtcagccatcttgcgcaggatctccggggtgaagacgccgcccatggtggagagacccatcaggatggagggcttgacgtagtcgatgacctcttcaagagtcttgtactgctcgccgttgttgtcaccgcgggcaaagtagaccttgtggtcggcgagcttgtcaccgcggtcagcggggggaannnnnnnnnnnnnnnnnnnnnnnnnnnnnnnnnnnnnnnnnnnnnnnnnnnnnnnnnnnnnnnnnnnnnnnnnnnnnnnnnnnnnnnnnnnnnnnnnnnnnnnnnnnnnnnnnnnnnnnnnnnnnnnnnnnnnnnnnnnnnnnnnnnnnnnnnnnnnnnnnnnnnnnnnnnnnnnnnnnnnnnnnnnnnnnnnnnnnnnnnnnnnnnnntcaccgcggtcagcggtgacaagacccttggtgtcgacaaggtagaagcagttgcgggcttcgtcctcagtcatgccttcgcgcatgaagaactcgacgatctggcgggcgacgccgacaccggcactgccagcgccgaagaacacggcacggtggtccttgcagggcagaccggagcgcttgacagcgttgatgataccgccaaggatgacagcgccagtaccctgtatgtcatcattgaaacaggtgtacatgtcacggtaccgccgaagagcagggaaggggttcttgaaatcctcgaattggatgacgatactagagatgcattgttagtcgcggtttccatataggacatgtgagaatgagtcacttacccgggccagcgctcggtaagagcagccatcagctcgtccaagaactcccgctcctcctcgggtgagatcttctcgcggcggctccccatgtacagcgggtcttcccggagggtcttgttaccagtgcccagatcgagagtcagaggcagggtgacctcgggacgaatacccgcacaggcggtgtaaagcgccaacttgccgatggggatacccatgccgttgatgcccagatcacccagtccgaggatgcgggagccatccgtgatacatgtgatctcgacgctaggttcaggccaattggcgatgaccgaagccagattcccgcgatcttcccagctcaggtacatacctaaaacgagcgttagcgtctccggttctatttcgtgcggagaagatgccaaatgcggagaagacctcagttatcgctgatacgtaccttcgggctgttggtaaatctcggaccaccgttggcaggcctcgcccaccactggggtatagatcaggggggtcatttcctgcagggattatggttaattttcgtcgccccaagatttcccggcccaatcacgtgtctcggtgcttgacgtaccctgagatggtctgtcaccagacggtaaaacaggtgcacattgttcttgcgcaaagtgctaaggtataggaatttttcgataggtgtgctcttcagacccagctgtgccaggcatcgggtcctttgcgtctcgtagctctcggtgcgaggaggcgtgaggccgtaggtgcggaggtacttgcggatgtatgcagggttggcggtatcgaagttggcgttactaagaactattagtgactgctttcttcattacaagcccgagacaggtaagctgatctgggtggacatacgcaggcaaggcatgattcacaaagggagccgaggtggtatgcgcccgttgctgagaaggatagggagccattgtgattgactgagaagacttcgagtttggggtagaagtggaatgatagaaagaagaaaaagatttgggagcagatgcgagtctgtttttatgtactcgagacagcatactaagattgcgctgggatgttcgtgcgcacatcatccaggagattccgacagggtgatgaccagataaataaccgggaccgcgtgtcaaggcgacacggtatagtaaaaaaataagagtcatgacttgaagtcggaaagagtcggacgaaggagagggtcacgacccatgtggattcattttcggtgttgacagcgaaccgttgtgcatgaaagccattctggaatctggatccctccaaaagctttttcgttttgctttttttttcttttcttttattcgggaagcagatccagcaaggagaagtgtatcaccgtgtggggaccgggggggggccgactccgacaaatgcggagatgcagtcaaatcagtgttgaatatggaattgaaagggcagaatcccgagttattgaatgagacacataatttactatggaaattacttggatgatcggtgcgggatttactcatcattccagccttgcggaactgcacctgtttgccctccatcctccgtacatatcgatattggggacgtgaggggattgggaaattggagtattcggagttggacatttacaatttacacggtagacctcgaactggtgacagctcccaagcagaatggtgactaaagaaagactgtaacctgattggctgcaaaagccggggatggaaacgccatcggtccaaacccacagctacgagcttctagagccgcagatagtgccgaagtggagtccaactctacccctaattgattctattcggtgtttgcgtttctcgtggaattgggatttcctcttgatttgaacttgagcgtcttcgacggtttcgagaaagcgatcaaatgccatttgagaatagaaggcggaggtcggcgacggagattgccgctctcaaaggtcatatgttgcgcacaaaacatcgctagatctataagataggaaaatgatattcgctgttccgatcggaagctccccggtgagacttttaggcctctgtttcgagtccgccgcgttggcgatgatattcggccttgtgaatggctctcggtcgccgacagagggatttttgattacttatgttctctagcacggttgcgttatttttatttttatttgccccctccaattcttcaattgtcaggtctggaaccacaagctttgtaacaattcggaatccagggatttcatatctcgtcaccgattggaccccttgtccgggtaacctgccagctctgtgtaacgcggaaagcttctattaataatattcattcctatgctctgctctacagtgtacatatggaatagttacggagtacggagtacatatctccgaactcgtcagggcttttccctgcagttcccaacgttgggacgggcttggaagggcttggctatctgccgcgtgggtgtacattatagaaatgaatgaatgcattagacatgtcattctgaattacggagtatatgaggcatatatgttcacatgcatattgtctcctttatacagatcaaggtctccctatatgaagtggtacgcagttcaaaagcgcggaatggataaatcgaggatcaaatgaagccaacatcgacatacatcgaaataagcccgatctaattggaactagtacgccgtatgtattgccatggttgcataggctacgtgaatggcccggctaaatccatagctttccccagatcgcggatcatcgatttttttacataatcgcttcattgcttcaattgcttcaattgttcaattgcttcagaatttcatatatcttgatcatttcttaattagtaaaatcttcaaaaaacattccggctttaatatacatacttcactagtaaaaagatctagcacaaagaacaaacatctacgtcacactgtacgggtgatgttgtcgtcatgtgctcaaaacaggttccccgagcttaactcctccctatagaacctcaaccttcattgagcttcatctacggagtactccgtacaaacattactattagctcacataatccagggcctattcaacatgccctccgagactgaacccctcctccctcgctacgaggatgacacctcccgtcagcgacacctccaccaaaagctacatagctaccaaatagtccgcgccatctccgagggctacatgccaacaactgaacaaaccatcgccaacctccgtacccttttggcttctgatgtgctcaacctgcgcaatcaagatataggcagcgacggtcgccaactagtgcgggacagtcgactgtggatccaggtctttatcgaatttctgcaacagaagaacagccaagaccagctccaggagtttttgtggcgcctggcccgttcgcgtgtcgaggtggatagagacaggctttcgagacaggccgcccacgtgaaggcgcgggcagatactaaagctggtgggtcgcgcatttccgcctctgcaactctccagcttccgggcttggcaaatgcaaattacaaactgatgatcgttcactaatccccgcgcgtagcatatgacagcttccgcactgtcgctggtctgctcctgaccaatgctgattttcgtcttttcgtcgatgacgtcgttaccgttggccgccaaatcttcgctgataccactgagtccctcgctgaatcttccaagctcgttgctgaacaagtcaagccgtccgaggaggaagagcaggcgctacagggccccggtgccgatgaggggcatgcgctatcgaaggccgaggtggaggaggaagttgcacatgtcgcagatgtgaccagcaaagggatcgctcagacgacccatgacgctgtccagagcgctaaggagcacatgtcgggccgagagagggacacattgctattccgactgaagcaggcggttcaaaagcttcgggagagaacggactactctgactcggtggcgacacttgctcaattggtatcacgctatgctaagatctacgcggatgtagcagaggatactgcttcacttgcccaagaagacctggaattcaatgctgacctcaagcgggcggtcgacgaattctggattctcttgcggtccttcggtagcgcagaagagtgggatcggctacaggagaagttccacaatgtcttgcgtcatgcaaacaaagatcccgagtttgatgatctactcggagaggtcggaacttcgttgcaggaaatgctcaccaaccccgagttcttcgactcggcgccgcagaagctcgataaactcaagcaacactccgacaaaataggctcggaaacgggcctgcgaaaagatgtggacgaatttttagcacagaccaagcgcacactgagaaccgtgccggaagacccagccgtctccaagttaatcaacgccacgaagaaggtgtaccacggcgcttggggcgcctataataacaaaaaggccgacctcccagcagacttggtgaacgtcttcctcccagtgctcctccgagcaatccaatatatcccaatcccccgcctagagatctcggctccagaaatggacctcctcctcgagaacctagttcttgaacccggccacacagtaaacttctcctccttcctcccctaccgcatgcatctgctcacgcgcaatgacatcgacgtggtgaaaacccattccaagcgcacagaaacactcatgaaaacagccttcacagtcaccgtccagggcctaaacatcagcgccgaagacttcggctactggttccgcacccacacaggcttcttccacctgaaggacgaaggcatagcaagcttcttcctagaccgccgcggtatcgacatctccctagacattgaagtgggccgcggcaggctggagcagatcttctctttgcgtggagttcgcgtctgtatccacaaactcgactacacggtcaagcgtagcaagtggagattcctcttatggcttaccaagccattgctaaagcacctcgtccggcgcgtgctagagaagaagattgcagaggagattgttgcagcgacatttgcgctgaatcgtgagctagtctttgcccgtgagcggctgcgtgctgcgcgcatcgctaacccgcacgatctggccacgttcgtgcgggctgtcctcgcgcgccttaaacccgctgactcggacgtcgaggctagaattggtcttgagccgctaaataagggtgtctttaggggcgtttatgctcctggaagtatcgtcaagacctggaatgaggaggctacaggtgcgcaggaggctattgagaacggggatgagacgcatgggcttggtcatacctggcgtaatgatatctttaatgtttctgggcactaattgtgttacttatctgatttaggtgtttgggggagttgctctacttaattacagcgtgtttatgattttatgatgaatccgaactatcaccggatgttaacccgtgctcggtgcttttgttttccgttctaatgctcatctcttgcttccttttgatcacataatactctactaaattaagagtcctaatcgagtctaatattgttgtaggggtagtaaaacatacgggtatcttctacccaggtccttctttgaaaaacactccaatttctctagattgatctcctatttggacgcagtataggtgaccttaggagtaacaccaatgattagggtgagcaaaatataaaaagaccacgagattcggcttttcggctgctccgcaacgaggaaagggattgaaggcttcgaggtagatagcgctacatatttgtcttggccatgtgtaaggacaaattccctttatataactaggaaaaataccagacgttcttaaacagcgatttcgccattcacttacataaagccatcatagatcatacaagctcgggtacctactcatccaatccgaacaataattttagatcctctattatataggaattaactgtgggagacgacaaacaggctgcttgtaggccatattactatccttgctgtcggactcgaagttatccaaaagcaagaaggcatacacatattccagctttgtacatcgatgtatatctatgctgtagataattgagcagcagacaatgtaaccaaataaagctgcaccataaatgaataaaactctcgatgatattcagatgttctctggtcaaaagctagtactcgttcatattgtactcaacatcactcatcgttcattggttgaccacactcacacgtgacacggctaaacattgttcctcttttaggccacctaatgtagatctaagcattggagctgcggagcaaacatctccaatctctaattctttattcgaagaacaccagtgacacgagcgagtgcattctccatgttgattaattaaatattacaacaaatccaccaaacctttagcttgtcgaagcttcacctacctacatacctcggtctacacaaacacaaaagctccacatctctccgagcgcacgagcagctgctcgcgcagctccgctgaaatgcaattattacgactcctggtcacactagctgtagtgctattctcagttgttgtaatcgccgctgaggattactacaaggtgcttggtctcgcgaagtccgcgtcggagagggacatcaagcgcgcatacagaacactaagcaagaaataccaccctgacaagaatccgtgagtggagctactattctcttatctctattttcatgctttcatttctctacgtggctcgcacattacactcgcacaaggcaattgctaaccttcctcgcagcggcgatgacacggcgcgcgaaaaatttgtcgaaatagcagacgcctacgatgtgctttcgaccaccacgctgcgcaaagtgtacgaccaatatggccacgaaggggtggagcagcaccgcaagggcggagcggccggcggcggcggccacgatccattcgatctgttttcgcgattcttcggcgggggtggacactccggtcacgcgcctggacaccgccgcggaccggacatggaagtgcgagcggcgctaccgctgcgggatttctacaatgggcgcgagatcaacttcctcgtcgagaagcagcagatttgcgattcgtgtgaggggacgggatccaaggatcgacaggttgtgacttgtgatcggtgcgcagggcgtggtatcgttattcagaaacatatgcttgcgccggggatgttccagcaggtgcagatgcagtgtgacaagtgtcatgggcagggaaagaagattaagaatccttgtcctgtttgtgaggggaatcgggtcgttaggaatcaggttgagactagtgctactattgagccggggatggggaaggggactaggcttgtttttgagaatgaagctgatgagagtccggactggattgctggggatttgattgttgttttggatgagaaagagcccgagcttggagagtcggaggaggagaggacagatgggacgtttttccggcggaaggggaaggatctgttctggaaggagagtctttcgctgcgcgaggcgtggatgggtgactggagtcgcaatcttacgcatcttgatgggcacgttgttcgtcttggacgtggtcgtggtgaggtcgtgcagccattggctgtcgagactattgccggggagggcatgccgcattactccgagggtcatttacatgatcaccatgaagagaatgatgaagcgggcaatctgtttattgagtatactgttgtcctgccagatcagatggagagtgggatggagaaggacttccatgctctttgggagaagtggcgcaagaagattggagttgatttggcggaggactctgggcgaccggttgtgcctccgccggcggaggataaggatgagctgtaatgattgcgtttccaagccttgttcatttttgattcccttttctttctatggtcattgtatattgattgcatctgttgatttgcgtgcattttacggctatgggctggattagattagacccttggcttgtattaaaatgttggatatgatatacaatagacacggcctgaaccctacaagctaggggtctgctttttttgatttgaaataaaattggagacaatccaattggaccattggtttgaactttgtcgtcatacgtgactcaatttaaagccaaagttcttctgcggacttctcgcttcaatcgatacacgtggggcgacgaggatactgttcatgccgccttaatgccagatggagatcgacgatctggaagatccggccgggacacagttctatacccaatgcacgagactccagattctgattctacctgacactgtttggtcgcgatgcatacccctcgtatgaggggttttatggcgcaggacgtaaacaaagaaaggcgtacagcgcatagatctatggcgatggtctaactggaataggccttgaatgacaggggtatagaacaggggttggaggttgtagcgaatgagcttagtttacctcggactacacaaattccacttccttgaccgtcatttcatgttcgtgttcaatgtgactgatatcaatgtgtcggatgttcgtttgaaggttcggctaggtgctctctccatgtgcaagcatccacttcgcgggtacaggctctgtttgggctttggagagttggctgttcctatttattgcatcagatttgggttatttcataaaattccttagtctaattccgtgggccccattttatgccctatgtgttgttgctttggggacatcttcaggacgagtttcaataaggaccgaaacatacattgtcccttcactaacacaatagacctaggatctctgattcagtatccatatccccttagtactccatggaaacacgccaaacgggtcagggatgggaataaagtgtaatcaatctgtcaaagtttcgcccgtaaagccaaaagttgaaacgattgagaattctccacaagcctcatcccgccctatgcgaagtaaatatccctaaaaatcagctacaacccgagatttcaacctatcggatggccttacaatataggcaaggatagacacagccacctcgtacgaactacctgaggatctacaaaccttaggtagactagattagactacaacacacagttcgtgcaatctgatagggctagtgaatggtttgccagcatcgtatttcaagctgcagtccctgcctctaacttggtgggtctatatgtaccccgtatgacggttgtcgtatgcgtatgcatcatgcactatctttaatttgggaaaacccactatatgcaatgagactaaatgggggaaatatccaatacatactgtccacgttgaggagaaggtgcctagatgcagctataaacagactttggtgagactgatggatggcacgcggattcggaatctaggccggacagacgcggtttgccttcggatagtgtcatagtacgataggaaatgcaaaggggcgcatacggaagcactagtgacaatgccgtcagaaaaggattggtcaatcacgtcgatatatccaaagtttgatggattcaagtgcgttgtagcaactcttttcgtggagcggcgtgtaccgtgcatagtgcatcaaagaaagctacggatattgcttcaaaagctccagttgtggagctcgtgaaccacggaatcatgttcttcgcccacactgccgtgtgttatctcttttcttaactagtaaaacccaaggggctggctgagggggttcaaacagatatatcggctatagcgggttgcggtgtgggattgtggtgatttacgatctaatataatcatttgatttactatgtcatgcttcaatttagtactttgatagatttacaatttaaagggtatagtacagaatagggttgtgctagctccctaaagtgaaagtagattagatccatcaacttatacccatcttgcctttttgtgaacgattaactgtacagctttgaatagacgaagggtctcactataattatgaatgctgtgtatgttataagtacattttaacccggggctgatctcctgcagaaatacagggaaaatatgctgtaagacggcttaatattccacagaagtttctagggcaaacgggcgaatggtaatctcatatctatagagtcctagtatcaggataaccaatcagcagtgcatattttagcgtttcaacgcaagaaaagagccaaatgccgaatttgatagcgatcgacaaacgttagcctacaggctctggtaacggcaatgcgtagacctagcgtctaggatttgatttgatggccttgcatccaacctattggttcggtagtactctaaggttcgtatatatgtaaccatctatatctggaaatatgtatatacgcccattattggtataggaaactgatggtattcatatgacaatggttcacttaagatagcatcacaaataaatcatacttaccaaaatacatctatgtgtaggccaatcatgcctatagatagcatagatttgcggttcactgggaaaagtatatacaaaggtacatataggaatagcaagcatgaaagcccttgattttccaaatataccaacaagcgtgctatccactattttaatgaacacagctaaaataggaaacccgcgaaatcagtaaaaattcgtacccaccggccagactgccaatctcgggtttccaatggtgctttgagctccctcgtatgccttcattggcgtggttccgcatcgaggttgatatatgaagaggaggtatgggttcttgtttgctatcaaaattctctttcgtctcaatcatcagctatcttatattctcactctatctttacttgatctcttaccccatcagtgttcataccttcttgtttatacttcttcctcatacctcactcttcgtctaccttccatctcttctagacccggacttattgctatattaacgatatcttatctgtatcggaagatgcgtcccctctcgctgaagacaggctccagtggcgatggagccatgccttctgatgctctggaacccatcgctatcattggcctagccacccactttccaaagcaagcaacaaccactgagggtctgtgggagcttctcctacaggcccgctcgacgtggtcatcgatacccaaagaacgcttcaactcagatgccttctatcatccagatcccgagcatggtggaacggtaagtcatacccgagctatgacagaccaacatcaacatgaataatcggttaacagatatctgtctagtttcatgtccaaggaggtcactacctctcagaagaccccgcctacttcgatggccccttcttcaatattaccaagaatgagctcctgacattggatccgcagcagcggctggtactcgaaaatgtctaccacgccttggaaaatgctggcattccattgaccagtgctgttggctctaacacatcggtttttgttagtggattcaaccatgactacctgggtatcctcaattcagacccagaaaccactttgaaatacaaacccaccggtgtcaccaatgccattctgtctaaccgtgtcagttggttctttgacttcaaaggacccagcatgaccattgatacggcttgttctagtagcttggtggcgctgcacctcgctgtacagagcttacgtgccaatgagacaattatggtatgttaccatataccttgtgttgatattgatactatgctgataatatgctgataacgtttaaggctgtcgtcagtggtgtgagcattcttgaaaaccccgcggaaaccatcggcatgagtcaccatggtttgttgggacctcaagggcgatctttcagcttcgactcccgtgccgaaggctatgcgcgaggcgaaggcgtgggcacagttgtagtgaagcctttgagtgtcgctatcagagatggagataccatccgtgcggtcattcgagagacgggagtcaaccaggatggccgcacgccagggatcacagttcccagcgcagatgcccaagaaagactaatccgtgaggtctactggagagccggcctggacctcgaacacacaagattcgttgaagcccatggcactggaacaagcaccggtgaccctatcgaagcgggcgctcttgcaagagcattcaaatgtcgccgagagactccgctttacgtcggggcgatcaaatcttccattgggcatctggaaggtggctcaggtgtggcaagcctcatcaaatctattctaatacttgagtctgggattatacctgcaaactttgatatgaagcagacaaattcctctattcctgcaactgagtacgatattgcattccctaccgaggctcttccatggccatctccgggcctgcgaagagtgtcagtcaactcatttggaattggtggcaccaatgctcactgcatccttgatgacgcctaccactatctgaatgaccaccgccttacaggcgcccaccgcaccacatccactgttcctacaacacagaaaatcaacagccggctcttggccctgtgtcgaacaggaacggaatcaaatcatttcgtgacggattcattcgatgacagcgatcactctggacatggtaatacctttatggacacacccacaagcgatggcttttgtgaatcaccaacattcgcatcatccacatacactagcttgatcgaaaaaccaaagctgttcttactctcggcttttgacgaagatggcgtcaagcggaacgcagctgaattagccaagtacttgaaccgaagaatgatgaagtcagtcctccatgactatctccttgatgacctgtccttcaccctgtcgaagaaacgatcccattttccctggaggagcttcgtcatggcatcctcagtcaaagaactcgcatggaacctgtcagaagcgaattttgccaagccaattagaactgccagagttccggaggttgaatttgttttcactggccaaggagctcagtatcaggctatgggccgagagctcatggtctatcctgtatttcaagagtccgtggaggaagcatcggactatatccggcggctcggtagtccgtggtcgctacttggtaatcattttcttgcctcttttgtctaatgtgcttgactaacgtatcacagacgaactcttgactgaaagacagtcaccccgagtcaacttgcctgagatagctcatccgctgtgcacagtcttgcaaattgcgctcgtggatctcctggccagttggggaatcttcccaaaacgtgtaacgggtcactcatccggcgagatagccgccgcttactgctctggcaagctatcccgcgaaggtgcttggaaggttgcatactatcgtggatacgtatcatccaaacagctttccgcaaatggagctatgatggccgtgggcctggatgcatcgcaactgcaaccctatctggactctgtgaggaaggacaacgccggggagctcatcatcgcctgccgcaacagtcccaaaaacaacaccgtttctggagacgaagctatgatcgactgcctcaagagtcttctcgatgctgatgccatctttgctcgaaagttgaacgtcaagaatgcttatcactcggcccacatgcatgcgatcgctcaggattaccttagtctaatgggaatgctttcttttggaaggcagttggcagctccacatcaagtgcatatgttttccaccgtcacaggacaacaagtccaagaggaacatctgcctgcacaatactgggtggacaatatggtttctcctgttcttttcacaagcgggttggttgcaatgacctcaaaccaaatttccagtcatgactcgattgattccacggattctctgcgccttatcgtggaaatagggcctcacacaacccttcagagtgccatcaaagagacattggcctcgaagagccccaagttggaatttaagtacctagccgttctcaaacggacagatcacagcctcaacactctactaactacagtcggcttcctaggttcaagtggatgtgaactagatcttcatgctgtgaaccgaggttcttgcttcaaggcaagaagacggcccagactgttggtggacctgccgccatacagcttcaaacataccgagaagattttatttgagtctcgactgagcaagaatctgcgaactcgaaagttccctcgtcatgacctcttcggtgcacctatcacggattggaatcctacagccccaagatggagacattttgtccgattgaacgaaaacccttggttaagggatcatgtggtaagttcgaagttgtctccaaaatagcctcactcattgacacagcctaggtcactggaaactatgtctatcctggtgtgggttatttgatcatggcaattgaagcatcgaggcagttggtcggcgaggcaaagatcattggtttccaactacgaaaagtcaacatccgaagagccttgattgtacccgataccaaagaaggaattgaggtttccttgtcaatggcaactgtcgaagactcgtcatcgtcgcgaacgtggaggcgattccagataacttcctacaatgcatcgagcgaccagtggacagaacattgcactggttacatcaccgtcgaccacgaaacagctttcgatccaattgacaatggccgcgaagcagaagaagaaagccgagcattagaatccgaaattttccgcgcaaatgagacatgcgcaaaatccatggctttcaaatccacatacaacaacctccaaacatccggcctcaattttggtcctttgttccgaaacctcggagacgttcgcgcaagtgcctgtggacttggtaaggttgttggatcagttacagtcccggacattgcacagtctatgccaaagcagtatctacattctcatctcatccaccctgccacaatggacagcatgatccacttgatgatcgcggctgttctcgactttaccggaaagtccaccctggatcagatcagattgccgactttcatacgcaatgtctgggtatcagcagatttgaattcagccccagcccacaaattcacaggacatgcaaccgtgtctatggtgggatctgataaatttgagggccaaattcaaatgctggatgaggaaacaaacacacttcgcatccgcatggagggtattgagctcactccactggagtctggtcttgctgaaagtagtgagcgaaaattgtgcagcgcaattgaattcaagcccgacctccatttcatcgactcaaaatcggcctgtgcactaacttctctcaatgctaccgatgacactgaggctttgtactgggtcaagcgtcttcagcttgcaacgatactctacgtcatggatgcactggacgagctcaaggatattgatgccatgaaactcgatttgcacatgcgaagattctttgactggatgaagcatatgcaaggattgctcgagcgcaatgaaataatacatctgccctacagtgaattccaatgcgcttttcaagacgaggctctcaaggaagccattggcaaggaaatcgaggcccacagcgccgaaggcgccatcacagcccgaatgggccgcaatattgctcaagtcgtgcgccaggagactgatcctctgcatctcatgtttggtcaagacgctgtgatggaacaggtgtacaaggaaggccttcacttgtataacctgccgcagcatctacagagccacttgtctctcctccggcaccagcattccgagctgaacattctcgagattggtggtggcaccggcagcttcactgctgaagtcttggccgtcctttctccagaccttgcgaagaacaaaggaagcattgccagttacacattcaccgacatttcatccggcttcttcgagaaagcaaaacagcgtttccaagcatggtcagacatcatgaacttccaatcgctcaatatcgagcgaagccctgtcgatcagggacttcagctagggacatatgacttaatattcgctggcaatgtcatccatgctactgcaaacttgcagaacgcattgcagaacctgcgatctctattgaagccgggtggtcagctcatcatgcaggaagggatccgacaggacttcctgtggtacccacttgttttcggtcagcttccagggtggtggctaggcgatgagccatgtcgccagtggtgtccctacatcccggctgaagaatggaatcctgtgctgctgaaagcgggattctcaggaattgatgtcgagtatcccagttcgaacgatccagatttgacatggcagagtattctggtttcttctgccatcgaaacacccaaggagaagtcatctaatactgcggttatcttgacgttcggtacattgagatccgaacaagtcattaaagacctccaaggtcttctgccggaattgggatacacgaatatccttgttaaggagcctgcagatgtgaaaaattatatcctgcctgatgcacttttcgtgtcattgatggacttggagtctccttacctgttcgatatggacgaagcggaataccacacactcaagaagatgctcagcgagtgccaaaatctactgtgggtgacatgcaatcctctcatacagccacacgcaagtatgagcattggtcttctccgaacagtgcgctgggagcgggatgccgatggctcaaatatcgtcaccctgacagaggcggagcctgacatcacttcgccaaagagccttgctacagctatcggcaagattgtccagcggcaatttgtggacaacccggagaatgatcgccacgccgagtacatgttgcagaatggtctcatacacattggccgtttgaacgagtgggaggcggcagatcagtttcttgctgcacaatcctctcagcaagctcctcctcaacttcaacgcctcggtgattatgatcatcccattgagttgcaggagactgctgttagcaccagcgaataccactgggtcatagataaggaacatgagacaccgcaaaaagacaccgaggtcgagattgagattcgagcaattggtctctcttcgaatgtttatgccgaccgcctcgcgaatgaggttgctggtgttgtgaccaaggttgggcctgaagtcgaaggcccggccccgggtgacagagtcatttacatctcaggcgacaaaaagggtggttgtatccgaacacatggtcgagctgaccaaatgcagctcgtgaagatccccgatgagatttcattcgaagtcgcggccggtttggcttgggcatacgcgacagcaatccaaggactcggggagatagctcatctggcacccgagaacactatcctgatccataccagtgtaacggatatcagtcaagcggccattcaatatgcccagatgatcggagctacaatctacgctactgtagcaaccgtcgaggaacgtgatttgctggtctctaactacggtatatcccaagaccgtatcttttccaggagggatctgagcttcatcaagggtattatgcggtgcacaaacaatactggggttgacgtcgtcttcaacgcactgagcggcgaggcactccgggggtcaacggcatgcctcgctccatttggggcatttgttcatgtgtcgaatctagatctgcgagctgatactacaattgagctagcctctttacctcgcaatgtgagcgtctacaccgtcgacattcctttactggctcaacatcgaccaaaatcggttcgtcttctgctcatcgaggcactgagactgtactccgcaaaaaagatcggtcaactccacacaactgtcatggactttactcggatcaaagagggtattcaaactgcgcatagcggagaagcagcaaaagttgtgattacacctgatccgtccaacatggtccctatggtcccacgacctctccagccttgtcactttgatccacgcgcctcgtacgttcttgccggtggctacggcggcttaggccgaagtttagcacgatgtatggcatctcgtggtgcaaagagcctgattatcctatctcgctcatcagcttcaagctcagagaaaatggaattgattgccgatctcgatagaatgggatgcaaggtccattcactgatctgcgatgtggccgatctctctaacctccaacaattgtccagagcagccttttctaacttaccggctatcaaaggatgcatccaagcatccatggtcctgcgggtaagtccccggtcctcactcctcggtactaaatatacacaaactaacatattcgtaggatggcgccttcgccggactctctttcgatgactggaaagcagccattagacccaaagtccaaggttcctggaacctgcacacagtcctaccggacagcatggacttcttcattatgctctcctcagtcgcaggcatcttcggcaaccgcgggcagtcaaattatgccgcaggcaataccttccaagacgcacttgccgcataccgtgtttcgaaaggcatgcatgcagctagcatcaacctaggcagtgtatcgaacgtgggctgggtagccgagaaccgaaactcgatgcgcacgcacacagccacgttattcgagcttttgcgcgaagaagaggtccacgcaacggttgacttccttatccgcgatcagcaagacggcggaaatgcatcaccgcgctcacagctcatcctcggtctgccgaccgcggagatgtgtcgccagaacggagtgcctttacctacgtacctgaattactcgatgttcacgcacttccgtaacacggcgacagcgaagagcagtgaggtgtctctgcagaagactgtcagcactgctgcgcttttgtcggcggcttctggcttcgagagtgctgtcgttgttgtgtcggatgggattgttgagagacttgcttcgctgcttgccattccttgttccgaactcgatgcacagcgctttagctttggcggcattgactcccttgttgctatggagtttcgcgcgtggatcatcaaggagcttaaggctgaggtttctttgcttgatattatgggagcggagaatattagggctttgagtgaaaagattgccggcaggagtcgtttaattggagggtctggtgcttaattttccgcgtggtttacttatctttctttttttttacgaatcttctggggattatctttcgatactgattagcgttgagctctcgtggtttattgatttcacgtctgatgccccgttacgagatatgatcattctgcatctttctcttaggacattttccaatctctttttggttcatacactttaagactagattcactaacagaatgcctatgagcatttctacacagtttacatcggaaaagatttaaagatttgataaatgcgatacttcaattttgtccacctgagtcactctttgcgaatccatttcgacttattaatagtaggaatatgccatgcttgcattaaagaaaaatagctcatcgaaaccctaaactttccatccgttattcattatattcgtcaacacctaccgtgcagacccggaggggaaataaccccgtaagccctgtccaggaaatgtacaaacagccaacttgggctcagccccggatcgctcatgatgccacgcacgctcacgtaaggccaaataaaccgagcggaacggctggaggtcgccaggtagtcgagcaggcggtttacgaggatcgaagcccagctgctgaagttgcgcctcacaccaatgcagggtgtccgccggtaaatattgctctgtgtcgtagtcggtgtgattctgttgcatggcctgcagcgtcgcgatgtcggctgcgaggccaaagttctctacgcccttgggcgggtggtggtagttcatatagggttttccaggggcgcgctctggatggtctgcttgtttgcgaatgttgtggatgttccaagtttggacgtatgatttgatatgggagcggagagtgggcatgtagattgcgaagagggcaacctgttcagggattaatgttgatgagaagaggccttcgttgtgaagttcgcggaaatagttctagttgaggtcagtattctgcgaataggtgtaggataaacctgccaaagttgactaacatgatacagtgttactactgatttagcaagctgggcccaccaagattcaatccggtgggtatctgtggcacgtccgggtgcgcagcattgctcacgcaggacatccggctcagtgacgcgacggagtgcaaagtgagcatcggctaaaaggggaacctcagactcgaggtcagatcgaagagtccgtggttggcgatttttagaagcaacagtctcaagatggtttttgaggacacccacggccgtgtgcgcatccacgccaacatgaatccagagaacatatcgagaataagaatcgagctcagcaaaaatgcggaacccgaaattggccagctttgagtacccattcacgtgccaggtcagattaggcccggctagaatctttggcgggggaggacgccggggcacatcactggtgcggcgttcaactgtatccgggcgcagcatgcggtagacactatagagacgatcgcgggcaaatacatgccccttgcttcggaagtggttgtgcaatagttcctttccgtacccctcaatggtccccttgtccatttcctcggtcagggcgtcgaggatctcctgaacctgtgcttgttgttgtgcaggcgagtcgaggcggagacggatgccgagctggtgacgaagtctgcggagtgtgcggtgggagacctcataaccctcatcgtgtagaacggtgacgatctcttggtcggacaagcccacgtcgaagaaaagatttttgatgcgggcatgaagcgcttcattggaggagttgttctccatctttttcttgacgccccatagctgtaggcgtttggtcagagtacgcgacgatatttgaatatcatgctgcctcttcaggtgcttgcaaatgtcgtcacctttcattttcttttcgaacaggccgatgatttcggctttgtacggctcaagatccacccgaggacgacctgacattttacttggcgtatcaactggattctccattttgcgaattcagaccaactaatgttgataagaattagcctggagaagatgttcgtggctggggaaatgcgggcggtgtgctgagacctaccggcagaaatcgaccgccttgatttttttgttatcgcagcggttcttctcgagaaacaacgtcctcgctctgctcagtcattctcgatatatttttcggtttaatcttgtactactgatacgggctttacaatggtccgtgaactcaagcaccatgagaagaagtacgtccgcacctataattaattacccgcgcagaaatctcaatccgatcccatccaacattttgaaagcttcaagataccacaaaagatcaaaagctaacactgaaacccctgcagacttctccggaaggtcgacttccacaactacaagtcagatggcaatcaccgcgaacatgaaattcggcaacgataccttctccaagacccaatggactaccgcaaatacaacgcgctctgcggttctctgcgtcagctcgcacacaagctctcccagctagacccggacgcggacccgctgcgcaagaagctcgaatccgagttgctggagaagctatggcggatgggaatcctgaagcagtcccgcgagcagggcgccggtttgtccaaggttgagcgcgatgttacagtttccgcattgtgccgtcgtagattggctgtcttcatggtgcgctctggcatggttgagactatcaaggctgtaagttgcgtggggatttggtttggggtggattttatgctgacgattgtttcgctaggctactactttcatcgagcagggccatgtccgtgtcggtacggaggtcgtcaatgatcctgctttcttggttacccgcaacatggaggacttcgtcacctgggttgattccagtaagatcaagcgcaacatcttgcgttaccgtgagaagctggatgactttgatcttctatgatctgccccgttaaaaaagcattttgggtttttgttctgatatacccggcgcttgtgcattgtggcctgtttaggtttggcgtattgatgtttcatgaaatgatatctcatgtccaaagttctctggataactcaatatggatatgaatactacctatgttctcgagaaacgtagagacctgcaagcgcttattgtgtcgttcaccgaaggtgctcgccttctattccccgagctaccaggatttgatattgaaggttatatgatggctccacgtcactttcgcatcgttgcccatgctatgcaaatgcgataactaatctttttgctctcttgctatcagttcacatccatctacggagtacgcaggtgggaaaccaccattttgaggtagacttgggcccaatccgagtcttcatcttcttgcccacatcatctctaatcccagattccggaaggaaaataaatgtctgtacttccacgattcaggcgttgttcgacttaacgtatactactttcacaatatttccttcgcttgaggcatttgaggtctattgcgatacacgggacggcgaatctcgagtctggcacgacgttaataatgttgacacagacacagaatatggctattgagtcagatcgtatgttgattggtttacgcggccggatttgagcttgtgtggttttctatgcagaaaagcaactctgaacctcgttttcagaagttacatcaggttggttttctcgcttttaccgcatcgagagcaactctcaattccattatcatcaccatcatctctcactctgttcctcggtcaccgattacctattctcgtggacactctattcatgcataatgaacaaagggcaagtggcagggtgctcaggtgatgatcggtgacgcttaggtagtagcaaagcaggattatctaggtaatgagcagttacctttgaaagtcagggtactcaggtgcacaattttactcggtcgagagacgataagagcagcactagatcaaaaggagcaatgtttccagtactagacattatctgttacataagtaccgtataaggctatgtacagtgttccaataataataggggtatatcagtcttcaaaaaataacatgagcaacgcaaggaatgcaaaagggactggaattcaaaataggccagaggctcccgcgaagaaagaaggttgaacggcgggatgggaaccactggatgcaaatgcagatcatcactcggtgatcatggtatcatagggaaagcagctgaggcagggtatgtttgtgagcagcacctgtgcaaggctctgtgggggtaacaagggagtagtgatggttgaatttaggcattaggaagaggagaagacttcgaacgaagacatgtccaacgtcttcgagctccatcaggtgaatttgaattcaagctggtttttcccaagagctccaagagctgggcctgcggatttccttgagaatccgattccggctcttcatcttcggggatatccatacggaaccgacgcacgctgccttcgcgctcagtcttgccttcctcgaagaacggggtgcgcgagtcgcgggactggaagcagcgaggcgcgacgcggcgccagagaccccggacaccactgctcgcacggtcaatcttttcatattcacgccgccgggtatctggtgaggtccattccattactgtcgccgggacgtggatggacgaggacgatgggctgcggtggtgactgctgggtaaggtgtttgatcgatctcttggtgtgatgaagtggggtgcgctcgtcgaggttggtgaagtggactctatcccgaagcggatgctggaatatgaatgtctgactggagacgacggttccgagctgcctttctctgttgatatgcggctctcgcgttgaggcctgtacgtagctgatgctgtccggtatagagaaagtcttgtctcggtcgagggtctgttcgattcatcttgaaacagacgacatgactcccggtgtaacgctatcagtgactcgcgcttatcctgcatggaactgcgagctgaggtgacaggcacgatggcggcgttgggcacagctcggcgcgaatgcaaggaactgcggcggctgtttggtcgcgatcgcacagtgctgcgggatgccgagcgggagtgactgatcgaagtagatgtcgatgctcgtgattcttgacgaccgagctcgtttcccggtggatcgatccttttcaccttggccatctcagatggggacttgggcgagtcacatcccttgagctctgtgacagtggactcgcacttagaaatagacagagatggctgcagggccaggcatgtgacggaggtcatttcccgtcgggaaacttctgatcatatgcaaatataggcaggtgccctgattgctcagatgtatacatgtatcgaggggaagttcatgtggataagattagggttaatatatatttaaaggagaacacgactgcatctagaacataaaagagaagcaaaatggaactcgacaagcgaacctctttccttttattaatccaacatgcgcacaccgctcctcaactattttagcggagtgggggggcgtctaaagatcgtcgctatgagggcgtctagccagttacttgcagttacaaatgcaggggctttattgcgggagagtatgggggaggggtaggctacggttttttatagtcgcagtgctaacaatatatatagatagtaagtctatataaaggaagacagactattcacaacatggtcgcattgctaatctaggaaccctgtttgcacgattatagtattcggtcaataatcgaggccatattaaatataccaactgcactaactgcactagttaactgcactaactgccctaattaaggagaactactccgtacactaacctatgatagacatcgcatcctgcatgcgtgttgggacaccgccagaccccctagtttcaacaagatctacaaaagacggagaataaatagtatatactttgaagagaatgcaataaaaacttgaaagcgattgtctagaatcatctttgactttgtttaaagagaataaaggaactcggggttctcccgatctgtcaaatcaaggaatctgcagccaaagttagcagaagttggcaaacgttaactaataaatcactcactcttggttctctagtctcacatattctgggtgagcaatgaaaaggatcttcttctggttctcacgacgataccacatccagaccccgaccagcaggaataaacacacgccccaacagacgataatggtcacctcggcggggacatagcggggagcgtccttcgggcggaaggtttgtggacctggaaattgtgttagcgtgtgctcgccacgttttgacccctgtcttctcctgattttcttaccgatgatatttccaacgcaatatccaatcagatacaaagcagccacggtagtcttcttggtatatcccgcgacattggaagaaatcagcgatagcaatgccacgaaaggggtcggactggcttgtgtgaggtaatagccaatcaaacgaccgacattgttagataggggcagagcgacaatgagcagcatccctacgattgcagcgactaacccacccaaactggcgaggatgcgctgcccggtgatctgtccgacatagccgttgattaatagtgcaacgatttccactgcgccgccggggacacccagaatcagactctccttcgcgttatatccgaagcttgtaatctggactggtcagcatgcttggaatcttcaggtctttataagctattatcaacataccaactgactgaagaaattggaaatacccccatttggaatatcggcaatcaaggcataaaagaagaaagcccaggtcatcggatccaaaagcgcctccttgacctgatatagcttgaagtgcttattaccaatgccttgttggttgacccgcacgcgggcaacagccaagatgcgatcttcttcatttaaccagcgtgcattgagttggttatctggcacaatccagaggaataccagtcccaggcagatggtgaggagaccagtgacgaggaaaataatcttccatggctcgatggccgacccgtgtttctcggcaccgacggcgatgccgtaggcgattactccgccgagaatttggccgacgccgttgaagctgaaccagatgttgacgcggctgccttgttctttttttgtgtaccactgtttgggactgtgttagctcgactcattgtgtctaggttatagcctgtaggaacagagatggattttgtacctgggaggttaaaagtgcaaagcccggcgtcacagctgcttcaaatacaccgagcataaagcgaatggcgatagcaccggagtaattgttgacagcggcaaaacagctgagaatcattccccagatcaagatgcaggctgccgagtatttccctagtggaaggcgctggaggaggcggttggtcgggtattcccaggcgagataacctacgcaggagagctattaggtttgaagctcccagggaagagtcaattcgagagcatagatagaacataccaaagtagaacaaactcccgagccactgatactggtctccctcgagattcaaatccttcttaagacccataacgctggcataggagagagtggtttctacacatcagatcacagattaacacttcggattgaataaacagccaacagaacaaagcataaaaccaagactgctctttgctgtaggaaacaaaatcgaggaaagatatgcacatactatccagataattcatgccatagataaagcacatgatgggcatcatatgccaatcgatgatttttaacaagcggcgattcgtagcttcatccagctcgatagtttcaccgtgaagattgccaagggctttcatagcctcatcggcgtcgtgtgcatgcttctctatcgtggggtcgacatgttttatgttgcccatgtccatgccggtgtccacgctagaggaaattccgatagctttttcctctgaggccatggtgtcggttctatggggtaggtcgtaaagggacggggcagtagagtaattcagatcaagtaggtcagacagacaaatcttaggcccttcgtgagttgactgtagtacaactataagcaataccaaggcaatgtataaaaagatcaaggaacaccaccgggcgggcacagctaaataacatataacagaataacggtcaaaactccgcaggtccgatagctatacaggacgatcttagtacgtaacattaaataggttaatataccctgtactccgtgcgctgtacctctgagcaaagccgggtagctctgcccaggccgttatctcaagagtctcctcgaacgattcatcctatcacacaacgcagcacatgaggcacggcaaataacttgtgggcctctccacgataagaagccgatttatctggggttggcggtttgatgatgtgtctcattggatggccaagagaggggagggggatgatcggcacggaactgccatggtctgttggctgcggcgttatggttatttatcaatgcaacatagggaaggcaatgcggattattgcggagcgaagtagacgttacttacttggtgtgtatatgcggggatgcacacacatgtagtaagaatacgtcaagagaaaggtcgctagttacaatgtacaatgtatagattcctagttccgagtgaattccgatgaagtttaagcaaaagtacgtgttcttatctattgttccaagtggatttggaaaacgtctccttatcaaagttactccagaattcggatattcagagacttgcttttgatcttcatcgcagacggtgtgaaacatgctgatgagcactcgcatgtcttagacttaaccttgcccttgcatcctctgggcgtgcaggaaagcccttccgtagccggagaggctccagggctcgtgagcaatgatgtaagaaagcatcaagttgcaaaaaggttatatagcacgtcatcaaatatagaattttcattatgtatgtacatacagtggaacgtggactgcacactctattgcgcacccacacgggccagatacgcctcccagccctgctgctggtactgtttaacagcttcaacagggtccgcagcggcatagataccacgaccagagataatgaagtcggcaccgcggccaatagccgattgcggtgtctggtactgctggccaagcttatcgcctttagacgagaggttgacgccagtggtgaagacgacaaagtcctcgtcctgcgcgggcgcctccgtagactcgacctcgcccagcgaccgggtcgagacaaagccgagcacaaagctggggtacttgcgcgcgatatcgacagaggcggaggtgtaggcgcctgttgcgagggatcccttcgaggtcatctcggcgaggatgaggaggccgcgctcagagccgtaggggaaatcagtagcctgggcagtttgcgcgagggcatcgactatgccctcgccgggtaggatggagcagttgattatgtgggcccattcggagatacggagggtgccgttgtggtactgtttctggacagtgttgccgatgtcgatgaatttgcggtcttcgaagatgaggaagttgtgtttttgggctagggcattcaggccatcgattgttgcttggctgaagtcggagaggatgtcaatgtgtgtttttatgacggcgatgtagggaccaagacctgtgaatgggttagtaggctgtttcgtcggaggggtggtggctgggtttacttacggtcggcgaggtccaggagctcctttgttgtggtcacatcagcggagacggtaacattgctcttcttttcttccgcgacttggaaaagcttgcgtgcgaggggattggggtgcgattgggcgcggacgctataggtcaattgcgacttggacgacatggcggggttggcggggtgggttgatatgtatttgtatgtgattttgaggttcaaacgataagtgaatcaaattgaaactggctgataaatgcctttagaatacaattctcttttttgaggtccgaaagcagaataatagaagcgaagttcaagtcgaagaccttcggggaactttttctgccacggtggacccacgggccaaaccttcccggaggctggaactgtggcgcataatacgcatttgacatagaaatacatagcacatcttcgcttcaagcgcttagaaagaaagcaatggccatccaacaccgtagacactcaatccgaagagggcaccctgcacaagccagaagaacccgcccatcatacggcccttaccctgcggtttgcccgagtacacatagccgtagaggaacagagcccggaagaaaacccacagagcgcccagaccagcagcccactcaggatatttcagaccagagaccaggatgaagagcattgtctgcgaagaattctcgaggaagttggtgtgggcgcgttgagcgcagttgaacttctcagctttggcctataactagttaagtaggtgccataagaagtgtataggttcctattggatacgggcttgcggaggctgggtatagatgggaatgagacgcacgttttccttgcatagctccatggaggcatagctgtgggggtagggcaccttggcctccttgcgcaggctgccagtaatattgccgtgaacgaagcccaacagagggatggcgccgagtgcgacagcaatcacggcgctgagtatcattagcttctgttcaacgaagcatgaaagttaagctagaagaacctacccgtagttgccaggaacaatgaatgcgaccatgatgagaagagaatttggggaaatgatgcgatatggtggctctccgttatgattgtgtttgattgattacatgtatggagctcctttatacttaattggaggctcgggggtaacaagctccgagctcccgtcggtggaatcaatttgtccgttccgcccagtcatctactccgtaactatggatgaatgatggatacgagtgagatctcgccggcctacggccgtcgagatagccgttgcaaagcaaagcgactgattccaacttctagtgctgcgcaaggctcccctcttactgacttattggcttcacagcgactgcttttgtcataattctaggagaaaacttggccacgtgacacgtacgtacgtacgtacgaccttctgatttataattgcttcgcttcgctccgcaatcattgatgggtaatcattgatgacctccctattggttgatcatgcaattcatagcaatgagagggcaaataaccaatctcatgttcttgtgcaagggaagcttgtctagctttcacaaataaatgttcaaagactgctataagttccgactcccagtatatatcaggagtaatacgatacacaaaatgtccgctaaatgctggatgtcaaagttcatgttcccacgttcgataccatcctacttacactcccgtacttggcttgccaagcgaagaagtataggagcgctcccagcggttgtccgactagacaaaagctgacccaaaagatgcagttcccaatgaccctgccttcaggcccgcgcatattttccaatggtgcggtgaggctaatcaacggcagctggaacatcatcccaaagaacgcgacacctggacttgattagcccctaagctgtggctagagagtgaaagacataacataccgatgaaattgtgtgtcggaatgcccacgagcatttcgtgaagaatcgcggagatagtgaaaaccattccactcgcagctagaggactccatccgcgacccaccagtggcgagtagacatgtctcttcatgaacaggtagacaggccggttccaagatcgccaatacatacccagactagagctgttccaccaatcagtgtagaattcgcggtcaccaaaccgcatgacctcggccaaagcgttcaaaagcgattggaacaatgcaaagaagccagcaagccaaattatcagcgagatagtggatagtttcatgacccgctccaagatagaggcaatatccattactgcgatcttgtcaattgagttgagcaacaccggtgtggcatactgcgcagacagaagccaaatgaacactgccaggcccacgaactccgcaaggcgctttgcaacaaatgaccaccggatggatgctgtgcgcggataaacaggctgatacaccagcgtcggcgccagccaaaagtacgccaggttattgatggtaatattcctagggtaagggcacgaggagtagatttcgggcaagcccgggtctgcggagggattgagtagagcgaggcgaaggtctcggtttgtgaaggcataagagcagttcttcaaccacacgatgatcgcgtgcagctcgcatattgtcccaatgcctgggtggtggatgtaaaaatacaccacaaagctagtcactgtgaggcacagggtggcattgagcgtgtgcaggaaagcagtgtacggccaggtcgactggaagaccttctgatcgtgctctttctctttctctgtctttttctgacggcccactgttcgcttagccgcagtagcggctgagagctcgatgatgtatgccacaagcaaatgacacggaaccgaggcaaacaatatagaccccagaacaacgtcttgcctgcggtagtcgtggcatttaatacaaattagcacgccatactgaatacttattagctggcaattcgacacagtgagcatttggattacccactttcatgaagttctcaataaccaatcgcaggttcattgccactgtcgaaacattagccgtttccatatacaattccctagcgatccttaccgagtaccaacaccataagatttcgaaaacctaggaagttgggaagcacgtcggcctcccgactgaggctggaatgacgagcttctgagtggtatgcagctacatggcgatatttacttcgtttccttgtagttgatgttgatggcggagagacctcggtttcattctgaatagccccgttcgtcgaattgagctgcgattcctcgcgagcgcttttaactgacccagtgcgagtagccattttaacagctctgcgatctcggtactgtgagagattgaagggtcttcaagtcgagctccgattaaaccggagcaccgacggagagcaatgcggagattacaacaacaaccaggccgcacaattacggcaaataggaaaagaagaaaaggagaagaaggagaagacaaaagacagaaattagaaataagatgatttaatactgggcatggcgggggacgagacatcatagcgcaagcttgcagataaaacttgcaggggccaatcagcgtcacatgcgctcaagggacggatcctgcactccgaagagcttcgactctctccgcatctattgctctttttagccctgaaccggtccgattcagtattcgatcagtattttaaactccaattgcctgcgatcctcatgtttgcgaatcgacagccttgatcccgtacaacttttcgaccggtcgcgatggcctactacgaggacaatggaggtgacggcccagggcggtttggcaagaatttcgacggtccagtcggacctcgtagaccacgtatgtttgcttgctttaaggttactttgactgagcttctgcttgttcatatcccgactgacaaccgttactcttaccctcaggtctcgtcacggattatggctcttcgatggtacaatggatgcgaacacggcaaccgagatacaaaggaggacatcgattggagacggaacgaccgagtcccagcttcgcggtcgatgtatgtgttgcttgatctgttctggtctggcgagcaaagaaactgacatgcgacaggttcttcccccgatggcgcggccctattctgctgtcgatacaatccccgtccgacaccttcaccagtcaatcggaaaatcaaagaagcccattgtcgtggtgcgatggactccagagggaaggcggctgttgaccggcggtcatacgggagagtttatgctttggaatggaacggcgttcaatttcgagaccgttatggatgtgcgtatctacagcttttgcggattgcgccctcactaatctgagatgttgtctccggtgcaggcacactacgatcaaatacaagctggtgtcacgtccttggcatgggcccatagtcaggactggctagtctctgggggacaaagaggtgatatcaaatactggcgacctaacttcaacaacgtggagactatcgatgacgcgcaccacgatgcagtccgcgatctggcctgggcacccagtgataccaaattcctttcagcgtcagatgatacaaccctcaaaatctttgactttgcaacccgaacggccgacgcgacactgaccggacacaactgggatgtcaagtcttgcgactggcacccgaccaagggtctaattgtttctggatcgaaggaccaccaggtcaagttctgggatccgcgcactggccgctgcttaacgacactccacagccacaagaacaccgtcacatcgacgcgattctcgcgtgtgaacagtaacctccttgctacttcgtcgcgagaccagactgcgagggtattcgatttgaggatgatgcgtgatatttgcattctgcgaggccatgacaagccagtttcttctctcacatggcatccgattcacagtaaccttatctcgactggtgccgaggatggttctctctatcattatctacttgatgagccacacctgccggctggccagattcccaccgtggcgccgtacgacagcccggacccggcgaatactccgccgcaagtgatctatccggcacatcgggtacagtatgcgcatggtgctacaatttggtcgctagattggcatccactgggtcatatattggcttctgggtctaaggataatttcactcgattctggtcgcggactcggcctggcgagactagctatatgaaagaccgattccacatcggcgaagaggccgcagaagcccagggaacatggaatcgcgggtttggccggaaacaaatgcgcgaggacgaggagcaagaaatgcaggatgaagccgacgggctcgtcgatcaacgaccaggtggccctgctctgccgggtattcaaagtgcgccgtcggccgtccctcagcccgatcttccagggttgctacctggtattggcagtgctcagcctcggcagccaggaacggatggcggcgctatgggtgggatggatccgggccgtttggctgcactcatgtccactcaccctccatcgcagtcgagtacccccacacctggaatgcatgggttccccatgccgcagggtataatcggaacacagccgatgaatatggatctagcacaattacaaaagcaactccagggtttccctatgccacagaatctcaaccttcaagctttggcaaacaaccctggcttccctggtggatttggtggcctgcctggtttgcaaggcggtggtatgcccgatggaaatcggagacagtgatgaaaatggacatctgatttgaaatgcacgttgaatcggcttggcattggcgcaaaggacatagcatggctactttgatgcggggtgacggcgttatttaagatatcaaacaccatttgtatcataggaaattttcgggcatttcgaagcctcctggatccttgttgatgagactgtttgcgtaggtctaggttggctgggcataaacctgtagctgccgtccacgtaggtagacacggtagacaattgttatatccggcacatccggcacagtagtatggtcgagtagtagcagccggtataccattcaaaggccaccttgcatagggaagctggtgacaataagaaccatcacattgacaccgccccatatcatcggtagccaagttgacatcctgaaattgcctgcctcatacaccgcgccgaggctatccaccgtagaagcgttagctacctaatcattcgggaggccaagtgtcaagcaaccaacttacacaactccaattatactcccggctagaagcgactcaagcgctgcaataaagatgtacaccaacggcacaatccatatcacattccagttacggaaatgggtcagtactgcgcacccagcaacagtgagatgtgtcgctccgtagaatatcagcgtccagaaaagtgtgaagcgccagatgtccttcgtgtagtataggtagtatgcttgatgatgatgcgccggcaggggatcgtacaatgacggaaaggaaggcacttcgtagttaatcgggacgcgattgttggccatggagaaatagctgcgccgtttcagcaatcaatcatcaaagcatgacacgtgagcaggggacagtcactttgaccatatgtgttgctagcgtatcaacaaaaaccgcatgtctaagagactctcggagatgacgatgcttgtttgcactgtttagctccatatcattggtcagcctttcgtggtggatgccccccgtatttagctctggacccggacctcggcttcatctcacccattgagagatgtagagactcttgtctgggagcatccctatcacctccagtgttgaaatggccacggaaagatcattagctacgctgctacggtcgctgcaggcgacttccagcttccaagatgccgcttcgtaagagccaaataccccaatgaggtcaatattagactaacaacaggccaattctcagtctgcttcccacggctaccagtttcctttcaatgttagggaatcctctaaacctgacactcctttcctcacaactcctcactgcaccttcgctctggagccaccccgtcgacctccaatcatgtcgcaagatccttagcgtcttcaataccgccgccatcgccgtcttgcagaatgatactactgacgaaccccggattccgtacgggcggaatagaaagatagagtacgaggcgtgggttaaggcggtcgctgagggcgccgatgataagtccccgcggtggaggcatacgctgctgctgggcggaatcttgatgggattcgagggacaaaaccgacggggcttaccacgacatattcgggtgaaactcgagatggcgcttgtgagagcggcgcaattagcgctggaggagcttggttctgagactgggattgatggacagtgcctcactatggtcttgaactacacttttgagctgctgtcagattccgagagaagcacgctggattatgatcgtttgctcccggcgatgattcagtcatcatacttgtcttcggagggcctcgacggtggctattttctgggatctattgatcaggatgttgttgaggcctccgggaagcagtttcgctggtcggccaactctcccacatttgctattatctcggcagtagctgctcgcccgcttgtgtccactctggggcctttgtctcgtcttatcgcgcattctgttgataatgtccgggatccgcgaattgttgcgcagactgttgattacctagcgggttttgttcggacactcatggttcaatggcggcagaataaattgtctgagattgatgttgcggaagaagcagagttcctagactctgaatcccgggacattacgcttcctgccctctggaagctgttgcgaaattgcttatattcggtggttatcacacttcgggctgtactggggagaactatcaatgatccagctcttgccgccaacagtagtgagttacagacgagtcgtgtcattttttttttttactaactatgctcctgtcaggcgccccgtacctatcgatgcaatgtctccacatacttcgcaacatgtatttcatctcttctcggattggccagaatgcctcatcgcagcagacgttcgttatgttggcagccatagatatcctctcccaatatcccactcttgccgagaacttcctgagaagcattaagccaagcgatataggacaaattcctgctcacccaattgaacgatgtctggatcttttcttcttgaatgtggcagagcatttccctcttgtcctatccccagggacgaacgaggaactgttactatccgccgcttttccatatctcgcagccggtgctaacagtcttctgttggagattttcgaagctgctcacagcctagtgcttgttgtcttcgctattccccacaactcgggattagctgccaaacacttgcctttttatatagaaaaccttttcgctgtgagtttcatcctggctattatacgaaagtagttgctaatcgtccacaggttttccctactaacctttctgcgcgccaattccgccttgcgttcaagactgtcatccaaattacagcacctccttctcctctggcgaatagccaacccgctctcccttcaatcttgctggaagttgttcacgatcgtgctttgaacgcttcctctacaccgatccctgcgcagggcccaaatccagacatgagcctgagtccggccgtctctgagcaggctgttctgacccttgctctcatcgattctcttccattcctcctagtcgatgatctgaaagaatggttgcctttagcagcacaattgatcaacacaattaccgaccgcgatatgcgacatgcttgtatcgatcgtttctgggaggctatagccggcggcgagatggatgttgatcgatcttactgctgtattacatggtggagcactgaaggtgggcgcgagcttgtccttttcggcgccgagaccgccccgggggagtctgatgatactggaccttacatgagtggcgcggttggaggtgtcgcgcctgaaagtaagctataatgatgtcactttagatagcttgcaatattgaagctacggctccaacgggtgcggtaacaccttataccatacaccatacttctaatcgatcaagtctagttctgaacattttcatatatactaatattagtgtgttcttggtatttattcgactcatcatctttgaaaatgtaacgttcagcaactaaattcccgggatcccaaccggggtagcctttctgtactgaacatactcgtcgccaaagaaggagatcaagtaagcttcttctcctgcaatcacgtaaatcagttagcaagaggtccaatgcgcaaaaaccgacagacaacttacgcttgatccggctcgagaagaactgccacaacacgagggcatatccaacaaaacaaaccatattccctagtatcaactgtgttcccagaccccaccagaagaatccaaagtagctcggatgccgcagataccgataaagcccagtattaaccaaaacatgaccctcctggtgctgactctgcacatgatgattgaagttactagcagcctgcgccatagcaatagtccgaacaatctgtccgatcaatagaagcgcaaagcctgcgacaagcagaagcgagaccgagcttccgaaaaacggttccgtcacagtgaccatccgcccagcagcagtctgcccgggccagaaaacatgcgacacgatgcactccacgatggcagatccgtgcgcaacattatacgcccatccgttagatgacagcaggaacgcggagatagtcgcataccgcgtgttgtattgcgccgtcacgtagaactccaggaagtggaacaggctcagtgaggcgacgaagaacggcacgcgccacagtgaacttggatacacggtacttaggaacaatgccatgcttgctgatagcccgaggctggtgccgaggagcattgcgcgcagcgaaattcccgccagagacatcttgccgtccgggtagattgaggtatcggcatcgggcgtgtcggttgaggcatcggaggaagaagggaaggatatattgctgttggtgcggtcgtggactggaggtccgggtggtgagatgtgtttcgaagtgtgggtgaagttcagggctttgtttggctctgcgccggagcttgttgcgagcattgtcaaagaaatagagaattgcttgggaagaaaggggctgcttcttgatgtgtttatttggttcgaaaatcgggcatttcgagggaattagtggaatttaaatagtgtgtgttggtgaggggggagtttcattgtctgagaacaatctcaagaagattgtattgtttcgcatcggcacccgcggactttttcccccgacatgacggtggacatttcaccccgggcccacatggcctcggctttagagctctaatacctcaatgtagcttgaattacaagctagtgcctagcttcgctctttctcctctcttcgagatagctatgaccatcacaaccatgtcagagcctgccgagaaagagaagatgcttcgcggcgagctctttcgcgccttcacaccggacttaatcgctgcccgtgcgcgctgcaagtgggcctgtaatcggttcaataagtcggacgaggtgcctcgtcggcgtcttgttgaaatgtggagagagtgggtgatgcggtcaagctgaggcttaggtctacttcatcctagaagtatactatttatactaaaccattatatagtatcgccgacgaccagacccctctgccaccaaagctagatgaccccgcagctgatgaagctctcttcgcgcaggacccctggatcgaatctccggtccatgtggactacgggtttaatgtcaagcttggagcgggcgtcttcgtcaactttaactgcgtctttattgacacatgtcccatcacggttggggctcgcactttgtttggccccaatgtgagcttgttctcggggactcatccgcttgaccctgccctgcgcaatggcactgaaggccctgagactggcaagccgattgttatcggagaggactgctggctcggcgggaatgtgactgtacttcctggcatcactattggcagaggtgtgacaattggagctggcagtgttgttaccaaggtatgttgaatgcaccttctgatagcctgattgtataatcatgctgactttagcaccaggatattcccgcttttcatgtggctgctggtaacccagctaggatcattcgtcggattgaaacgacaatgaaagagtgattgaccctgtgttattcattgactggtagatagtatagagatatatatgactttctggctacttgcatctatcgaatatcaaagggatcaaactgcgtctagattacatggacgtcatgcacgcctagttcagacagcgatatagataatgataattaactagaatgactctccaaaacctttgacaaattgggtaggattcattataccacgatagacgccaagagtccagactcgatgcataaggccgcataaggggctgtgcatctttggtgctttatatcggtttttatatagctggaataagagtgtagataggcagtcacatttgctacaaactgcacagtaatcgaattatttccctcttctttctatgcaaactgcaataagcaatgtaccatgcaaatacgcgataatcaatctccaggagcttggttgtgtctttgttaagagagaccatcttgtgaacgctctccacagaacaacgtcactggtcctggcgcgtcccccagaaaagctgtcgaccgctttatcttttctaaagacctttacttttctcccactcaatccttttcttaaactcacaaccttctttttcttcaaccttcattctcgcatcaccttcatttcacgcgttgtttcaactaccctgggaccactacgtgcggaaaatgacatggctgtacccccgccagatagctcttacaccccacctcacactcccttgatcgaagaatctccattcatcagtgactctatggacgatcttgatcctcaggcgacccggaaacgtccgcgtctcgacagtggaagtcgcgtcagtccgaccttgtcgttggatggaacctcgcgtactgcctccgtcgcacctgcctccgacatggatgaggcctcggattctggaaatccggttaacaaagtcaccattaacacaaaatctcctctatctcccatggctccagacctccctccttccgacgctgggctctccggcagcgacctagagcttctaccagataccgatacagctcccaatcccaatcccatttcactttcctcctcgccctcctcatcccgaagtcctcaaatcgaagtcgctgaaccggaagatatcaatcaagacccgaatacctcaaactggaagtcactgggccaagtggtgcgggatcaggatgagcccgaagtgatagaaatccaagacgtggctcctctttccgactcgttccctaaagtacacactgagatgacaccccgagagaatttcaaggcgcttggtgatatgcttgaatttggtaataagagactccaatcaacgagacctgggcaaaatactaatacagccaataggacacccacgcgaaggcacggcgcttgttacaataaaacaatggcttcacacttgtgtgcacgatcttgatcgcctcacaatcgaggaattcgcggccgatctagatttctgggaatacttgccctccgtcctggaccgtcttttgcgcagacaacaagactttcaattagatggaattgaagatatctcgagcttcttcgagcaatatcttctcgattatgctcgcattgtccttcatcttgttcgcttggacaccacacttctccgggctgttgacgaagatggcggtgacatcgaaatgcctccaagcacctgtcgacgatatcttcatagcttcccttggatattccatagcgaccaaattccctttttccgggtcctggaaaatcagtttagcaccgaaacgcgcaatctccctgctcgactaaaagctcaggtctcagctcctccgtttgatgcacccggcgcactcattcaatacgctttgcacctgcttgcattacttccgaattgcccgcaaatcgttaccatgctgtcaggccctttggtcaacatgctagcgttgtttgaatgcgacacggagaggaaccaaaatggtgattctgattctcccgttgacctgcctatcgattcaaccagcctccagcctttttacgaaacggttcgagaaattgacaaagtatacaacacatttgtcgcaaagaagtcgcaactggccaccagtgaactgagcgatagtctcctgaccccaatcttccgcagctaccgtttcctttgctttggttactcggaatttttgctccaacttgcccaggaattgtccattcaactacctgaggaggcagatgcagagcaagctgctttgtgtgtcatttggacgtggaaattcgataccttaaagaagcaaatcatggaaggtcgaatggagcttcgtgtccacggcgtggaaatgatgcaatcggatctggtcagcatctggggtcaaaatatatcccagaaccgcgatggcatcgagtcgccattcctgaaatatttggttgaatatcttcgggagaacaagatcctcgattacctcgtggggattgactcacacccacagctgatcagccgcagcagtaacatattcggattcctgattgtgacggcgaaatacaccgaccatgacacggatgttatctggaaaaccgtcaccgagagtcaagatgatcgtactgtttgtgaggtcatgtccatgctcgcacggacctttgccatgcatccgtcgaggtctaaagcgttgctctatgtgtgctcaaaattgcttgagtttcccttagaccgcttcgacagccgcataatcgatttctgtgagcagctggtgcctcgtatgcgcgaacggcactcggatcgcgatcgggactatcgtaacatgtccggcgaggagcatatcgattctattccactaaagctctgtatccgcctaatccgtgagagctctggagcgaaggacctgcctctggaacaaaaggaacttatgcagggatttggaagcgagcagctgggacagttcatcaaggctggactcaacgaaaccgacatggcagagacatatgagcgctgtattcaagacattgcggagatgaatgaatgcactgcgggcagtatccaagttttgaatgcactagtaccgcgtgatgacgcacgagagctttggaaacttgcgaccgatttcgacttgacgcgcttagtgataatcgaacttcaccatctcgttaccaaagactacgcgaagctcaaggatccgtcttcaaagcatggattttcttcgcgggtggaaatcctgcggcgtcttattgatctggccccagaaacaatcacacctgatctcgggaacacactctggaaggatattttcatgtccgagaacctggctgctgaggaacgtcaaacgatttggaaaatgatggttgatcttaccaaccgtaccaccaaagagaacccgtttcttgaactatgcattcatgagtatctaccagatgtgcttcctaaggattactcgcgcgaggtattatggttcgctcaacagtcggttcactacgagattcgaatcaagtcacctcccattgttggggaaaatgaagtcatatctattcctggaatggatcgaatctggaacttcatactgacggcacctccgcaatcgatcgaagccgaggcgattaaattcgccatcgatagctatctggaccacggtattgttcgcagatccccccggtcggctatcgacgctactcatattgcactcgtcaatcgctgcgtggaccaactgaagtctgcagctgtcgcgttgaaaccttcttgcaacggaacaaccaatgtcgaagtttctatggatatcgacagttccaatcaagacgtcggaacggacgaacttatgttcagccggtctctacattttcttcgccaattactgcatggattgcgaactcgcccacagtacagctccccgcgtggctctccgcccaccctcccggaacgtcctctgaaaggcgagcccatcgaatttcgatatcaatgtttcaatggcgcttccatgtccaagatatgttcaaagcgcattggtggtctctctacggctgccgagcttgtagaaatgcttgtgcagctgagccgattctcgaagttcacagctatccttggcggacagaaggtcgagttgctacaagatccagaggcacttgtgaaaaacctgaagctatcttcaggtttactgattcttcggaaggcccctgatgcccatgaaatcacgtgggccgggagaccgcagtctctgacagcagtggacaacgaagtgctgaagcacttcgacgagctgtatgatatgcttgacctcaaggatgatttggctcgacaggtataatcccgttggctctcttattctagcgggatgttgatactgacactttgcagattattgacttcttggtggtcttcccacctcaagtgcgggccctcgaacttgttcgatccaacagcaataccgagaaagacatgttcccgttgcaaagacctttcaaggctttgtactccttgaatacactatcgatgtgtctccacgaagaggctgcagaggtgagttaaccgtttctgggttgaatgatattcttgctaagatcgtcatagatgtctccagaccaagcttttgtgtctcatagcaatcgggttttagttgctttcctgacgtcagacgaactgttcagctcgctctccggtaactcggtaactactgtgcttgctactagagccattgaatgtcttctactggctatatccggtatgtcgaatattaattattgttcagtcaatgggccgcggccaactaattgtgacctagtgtatcgcccgactgacgatgagtccgttcttattgccgatccaatgtctttggtccgacgcgttcttgacttgcttgaaattggccgcagtggtcccaatgatccaccggcttgtacatgcgcccaaagcttgatttgcaattcctttgcggtcttagtcgagggttcattgcgcgaccttaatgtctggaacgctgtcaaacagcatgcccagtttgatcgcttaatcctatctctactcctggaagaaaatcgaaagccaattcggactgatatcctggaacgcttgaagataatctgcgggcccctgaaaccgttcaagctgtctacgaaaaaacccgagatggaaacccctactatggaaaaccccaaccggattgacatgcttgccactctgtggtcttcatttttgcaagtgatcccgaggaccgttgagcatgttccccagtctgaagagttcttccacgctgctctatggatgttccgcacagtcgctcagaaatcgcctcgggacttgatcttcaacgagtatcttcaacaatggagtgcagttatgctcactcaccaaacagaagaggtattttcatccccgaagaccaacaaatactgtttactaatggtttttagtttgttgggcgtgagccagcagacaatttgatcatagggttctctgctttgttagaatggtgtctggaattgggcaacgccgcgggcatcactttaaacactttgtatgtcttccttccccgtccgatcaagtatgcagacatgcctaactgggttttaggaacatcgccgaagaaatattcaacaagtacctattcccggatttctctccagaaacggtggaacatgcagtcccacagattccagtcatgcacagctacactcgctcgagcctttacaatgtcgtgagcctgttgtgcaagcagaacgatcggacttattgtgaagttttggacctcctcaatacaaatgttccacgaggttagcatcacggaattttgcccactgcgttttattttcacactgaactaaccgcaaatctagactccccttatctggaatatgcatataatagatcgttgatgcttcggtccccggaaggctatgcgggcctcaaaaatctttcgaacacatgttacctcaactctctcatgacgcagcttttcatgaatatcgagttccgagactttatcctgaatctccccatagccgatcgaatctcccaaaagctactctatgaaacccagcgactgtttacatggatgcaggagacttggagcaagagcattgagccctcagactttgtgaaaagtattctcacatacgacaacgaggagattgatgtgaccgtccagatggacgtcgatgagttttacaaccttctctttgaccgctgggaagctcaggttctcgatgccgacaagaagaagaagttccggtctttctatggagggcagcttgttcagcaaatcaagtcaatggaatgcgatcatatctcggagagacttgagccattctccgcaattcaatgcgagatcaaggggaaggcgaccctcgaagacagtttgcgggcctacgtggcaggcgaggtgatgcagggaggtaagttaatactgcgcccctaagggagctcgaagtctaatgagccttcagataacaagtactcttgtacctcatgtggccggcatgtagatgccgtgaagcggtgagtgataatgatatagtgacacaaaccgactttctgactcttatttagtgcttgtctgaaagatgttcctgataatttgatcttccacctgaagcggtttgacttcgacatggtacatatgctgagaagcaagattaatgacgagttccaatttcctcaccacatcgacatgactccctacaccgtcgagcatctctctgacccggagcagaccattgcgccggacatctttgaattggtcggggttcttgtccacactggtacagctgaatcgggtcattactactcgtatacccttgaacgcccctcgtctggcggcgaagccaattgggtcgagtttaacgactccgatgtcggcaaatttgaccctagcacaatcgcaggtcaatgctttggtggtccgaatgagacgacgcagtacatgaatggagcctctaagagcaaagtctggaatgcatatatgctgttctaccaacgcgtgtccacaattgagaagtccaaagaaatcttcaagccaacgaagcccgacctccccatacacctccccgtatcaatttcgacccagaactacattgcaatggacaacgaaatgctcattcggatttactgccttctggacccacaatacgcatacttcgtgggcagattgcttcagcggtggcccgacatggcaacggaggataccgacaagactaaggcagagtcattggccatcaatgtcggaatggacactattgagcaattggtgacacgtaccaaatatttccaaggacaccaggaggtttacagcgaactcgtcgacatgatcaacaaaagccccaatgcggcccaatcggctcttgagtgggttattaatcggccaacttctatgtacaatcttatgatcaagacgcagaacgcagaaatccgaagcaagggaatttcgctgatcaattattccctgaaacatctccacttgatgtcgacatgccaggatctcaacgaagatgaacgaatctcatggcgcgaccgattcgatgaagctattcagcaaattgtgcccatggtgacagctctctgggccgaagttcaatcccttttacgagtttgggacgactactttggcttcttattgaagctttgcaactatggcccggagattattcaggtcttactcgatcaaggccatttcgctacatgtatggagattctctggatcgatgaagaagatagcaagaaattgcggatccggtatcccaattacgtgcgcctcttgaacaaaggacgtcggttcaaccatctgattttgctgtcattgtgcttggtattcttcaagcacgttgacctttcgctccgtccaacccccattggcggacaacggcggtttttgaatggcaagttctcgaccagcatcagagaaatcgaactcatcaagcctgttgaaaatgatgggtctctgtctatcttgctgaagcttctgaagcatgagactcttgcgaggagccagactactcgcgcgatcataggagtcctgttagacggagagcctgatgcaggtttgttggattcgattcaactgacactggagaatggtgtcagactagaacccgctatccagtgtacaccattcctggaggcagccacaacgttctgccagcgttgtccggataagcggcgggtcattgacatgatcgacttcgttgccaagggggtcgaaagcattgacaatagcggcggccaggagcatattgacttcttcatgtgtctttgccgtagtaccaacgagcggctgaacatggactctgcgaattttgcagagattgttcttgacaatatctcagtctgggccccgaccttgctcattgataaagacgagactgtccgtcgcaatatgcagaatattctcgaagagacgatctttaacgataagatcgtggaaggcaacacagcggactccgaacagaatggcgaatggcagaccattatcacaccagagcggcgccatagcctttgccgtcggctgccgaacgcatgcatcgagcggctcaaatcggcattcttgaccgatcagatcagtcatatcgacgccagactacttgaaaatattaccccggtgatcaactattgtctggctactttttacgacgactctgaggcggaccagcaagaagttcaacaggccaatggtaggtttgagtatctacacctagggttcttgcagtctcactaacacactcttctcagaactcatctccctccttaaatcgatgtcgctcgaagatgtccccgatgacccgccttctggtatgcttcaatatctatccctcctgaacggccctggaacatcatctaacccgatacccctagaatcggacgtagcctcagtcgaagattgggacgcaaactcggtgatcgcaactgattccgagatgggagtcgctggatctccttaagacaatggcatttcccgctgcaaattgctttttgttgtgtttctttcccatgcgtttttgcgatgtcaatggattcagcgagcacgatgtgtgcatgtgatcaaaggcaaatcctcatacctcacggattttacgaattcttgctgtgtttttcgccctatgatgattgtggttgttcgtggcgttttcttttgctcatggtgagccggagtaggatttatttctatgaagggtggctttggacggacagctcatctacatgcatttcgcaagactatttccgagcattgagataaatagtttctgtcttgagatttcaaatctttgagtggattgcattcaacaaagttcgtagcgcatcattttgttcattttgttcaatgataagagtaacacgtatctctattttattttgattaaccctcttgctctccgccagctggagcatcgccctcatcttctgattcaacctccacagcagcaagtgcatcctgctgagcccgcggagcgccgcgagtcttcttagctttggggctgccggggtcagcagcgttaggtgcggttgcgagtttagtcgctggaatgccaccagaagtaacatagaggaagtaacctgcggggaagtgatcgatatggttgaagaaagaaccaaagctacagtcaaagtcagtattgccgtcttaatgtgaaatcaaacgaggacgttggttggaataataacatacccagcactttggtcctcctcccggaaaattcgatcatagatctcccgctgcttgaactcattgatctccacctcaaacttctggaaattgatcggctgacggtcaagaccctgtgccttgttgttgtacgcgtcgaagataggccgctcaagcaagaggcccaaaccaggcgctttgggaatagcaatgcgctcaggaccataggtctcggtgatccggtctggatggcagcctgagcggacaaccatcgtagccatggcgaccatcttacggatctggtgcatcatgaaactctgcccatggactttcagactgagccattccgtgccgtcgatgataatcggcgttgtgttcaccttgaatgacttgatgtgccgtttcgccgaggggtcgttgtgcgtcttctggatcgtgtagttatgaaagttcttcgtaccttcgtagcggtcgagacattcttgcaggcgggcgatgcgtgaagcgggagcgcggtaggctcgtttggcggtgaggtatgctgctttgatggccttgatggcatcggcgatggctttttgacgggggtccatgacaaagggctttgaggcctctgcgtcggccggctgtttagtcatgggctgatcgctggtctcctgctgcgcgggttgctcggcgggggccgaagagacatccttctcttctgtgggttggagtgcatcgcgggagtcgtctaggtagagagacttttcgacgatgcggcggatgtcttcaggcagggtttctaagatcggcttgatgtactctatatcagcctcttcccaatagcctgcgacctcttcctgtcgagccgtgactgcatccaactcgcctgccttgtcggcaagctcgatgattttctttccaagataggtgcttgggtgaggcggcaggagacagtgacttggcagcaaatactcgtaaactcgggagtcgcacatctggtagcagctgaaacttttgctggtcacttcgtagccccagacacgaatttgggggctgagctgagcgtttattttcccgattatatcttcatcttcgacaatcatctttagtgacacaacatttccagctgcgtggacacccttatctgtgcgggcacaacggacgaaggaagatttcttgggatctgccgcattggctttggaaactgcgccgacgttgacgagggccgtgaatagatcaccttcaatggtgcgttggtgctcgttcctataccaaacattgttagcgcaaggatattaccttacaccgaagcagaaaagacttacaactgcatcccggagtatccagtccccgagtaccccatcagaagcgcaaccttctttttggggcggcgctcttcgctgtcgatctcctccttggagaattgggtagcgtagatcggcaagctgacatcttcgccgttctcgatcttgcgacgcttggcttcggccttgtcttcatgacgctgtcgcttatctatcgcttggcgacttaattagttagccgacaatgcgaagaacgggaggttacaattgacgcaacatacctccattccgctcgccccatatcgcggttcttacgccttccaccacctccgcctcctgttcctttgttgtcggccattgtatccgctggaagatctctgatagctccgcacgaggtgcagatgggtcgcgccagaaagaacggtaaaattgatgactaacagtgtggttcctggtgttgtggggaagcgatcgaattagaattgaacctataggcgcagttaggatcccagaaaggttccgttggagaatcgaggcacacatgaaatcaattttcggggcaatttgtcttcgactacgccttacgcgcggttcatcttttccctgatatgggcactagtcctataacggtctagtgtgtagataaatcagactagccatatatggtcatatttacacctgaggaatcaactttgcatgtgacgtgaagctccgcgctttgaaccggaattgcaactgtccttgttcagtcaatcaattgcttcagcgcggtctgtcgctcaagcgcaactataattctctcgtggaccccttcactccttttgctgcctttgattgaagcatgcttgtcttgtccactatctgaacactgcgacttatcgccttgcgctccagttaaattcttttccgaccttcttcccgactaccatcttttgctccgaagcttctgcaaacatggagctttcaaagacacttatccgaactgtggcgcgagcattttacgagacccgtcacatcttggtcgttgatgcgctctttctacattcagtgtatgatgagagttgatctctgttgattggtcactttgctgaccagctacagtcttcacgctgaggatctagcctttttgatgggaatgcaacagaaagatcttcgcaagctttgcgccaagcttcgagaggatcgcttgatcggagtgtatgtcacttctccctgacgtgatctacaacaaagggtgcaaaacacaaagctgatctagttctattttgattttaggagcacacgcgccgagatccgcgatggctctactcgcccagtcaatcgcgaatattattacatccccctacacccggttgtcgatgcgatcaaattcaaagtctccaagttgacagctatcatcaaagcgcagtacacaccgagtgaagagcgcaaggaatacatctgcgtacgatgcaaatccgaatggaccgaactggatgtattgagtctggttggagatgaagggttcgaatgtcaaaattgcggcgccatcctggaacggacggaggatgtcaagggcgcggaagggatggaccgtacgggccacgagaaaaacagtaagcttatggcacagctagataacatgctcaaactgctcaagcagattgactcggtcgaaattccgccgaatgattttgaaacagcgtgggatcacaaggtggaggttattcggaaccagaatacacacccagtccgtgccgcgattgctgttcctcccaaggcccaggatatcacacgtcctaatgccaagacggatgccgctgcactggagatctccctcacctcaagcgaggaaaagagtgctgccgagcaggccgatgaggccgctcgtaaggcagcattggagaagcaaaacgcacttccagtttggcacacacattctacggtcaatgcatcccaggttggcagttctcagatcaagaccgacgttggcactgtagtgaagcctgagcttgtggacgaggaccaaaaacctagtctggatgctttggacgacaaggtcgccgcgtactacgctgaaatggagcgcgagaaggaactgcaggctcaagcagatgccagtagtgcagaagatgattcagatgaagaagactttgaggacgtcgaggggatctctggtccaagcggaccggctacgccccccatggctggggggctttcaaaggccnnnnnnnnnnnnnnnnnnnnnnnnnnnnnnnnnnnnnnnnnnnnnnnnnnnnnnnnncagggggacgggctccgcccgccatggctggcggtcttacaagtgcccctaccacatcttctgggggcgctggcaccaagcgtgaacacgaaccggccgctactgtccctccatcatcaattgggactccgtctgcgcctgccgacgatggacctgcggcaaagaaaatcaaggtcgatcctgatatcaagcctgatcctgatgttaaaattgaggctgaggttaagaaggaggccgaggaatctgatgaggacgatgaggaatttgaagatgtataatgaaaccattaaaaaagtcaacattggcgctggcgccgaataatgatggcagactgtggagccctggaggcttgcaaaaccattcaaatcccgcatagccatagaattacattttgcccaatttgcaagacttcagaatcaagtaaattgacaatggatgacgagacaaagcaagtacgttgcaatccagtaggtatgcccaatgaaagagattaaagataatcgaacaggaggagaagtaggagtgctcgctgatgcttttgagcaaaaaccagaaccgattgctgtgctatgtaaagaagccatgtagctcccctacttagaggtataagatgacgctgtagtaactcttgccctcgccggctattgctagctctacaacacaaagaaacgctctatcatgacttggctaaacgtgagattcttacgtcccaattgagacgtccctgcagccatggcggcgcttggtaaaatggtcagccggagacatttcagttgagctcggagtttcttatgttatgttcgaattatatatttaaagtcatttccattatttggatttggtataggtagaaacatatctcagtaaacatgacggcgattgcactattctgcctatttctattggcagctaccagtctttatggcttgggtcgagttgtatacaatgtcttatttcatccactgcgaaaattcccggggccttggatggctggagccacatcgagttggaaagcatacaaggaagttataaaacaagagtcggcggttcatgagctctttgctctccataagaaatacggtatgaatgaatggtatctatgagaaatcctcttgacatttaataggttatattgtccgcgttgcgccgaacgaggtgagtattcataagcccagcagtctacacttccctctctgggttatagggctcaaacaggttacttacctctcacagctccattttggaagcccaggcgcgttccacgatatctatcatagcagcaaaaggtgggacaaggacacgggtctttatcgaacccccggagtctcatctgggtcattcacgttcttgaaatatgctcaggcaaaagaacgacgggaggtgattcttcccattttctccaagaaagccataaatagtcttgagcatctcgtctggcgaaacgtgagtattgctttgcttctgttcactggcaacctaccttttatccattgctaattcacggtttctaaataggcaaatcgtcttgcatcttctatcgcccagacaaatgccacaaaaagatctatcgacctactctacgcattccgttcctatactctcgacactataatgtgcttcacattcggcaactgcgtaaacgccctggatgcgccggcattcagcgaccctctcattctagccatggacgccagccttcgtatgctgcctctcatgaagaacttccctatgatacgagacctcatattcaccgttccaccggccctagtcatgcgccttatcccaaacgcccagaaactagctccacgcctataccaggtccgggatctcgtccaacaacagcttcaaatcgtcctaaactgcccttcgaagctagataccgtgccacaccagaccctctttcaccgaatgctcgacccagaatcataccggagcaaggaagtcctgaatctagcagaactacatgacgaaggcttcacactcatcttcgcgggcgccaacacagtagccgacacgctgctcatgggccactggcatgcaatgcaaaaccagactttgctaacacagctgagaaatgagattttgactgtctggcccgacatcgacaaacagccatccttgacagatctcgagaccttaccactcctcacggcaactatcaaagaatctctgcgctttattccatctggcgtatcgctaacgcgtgtcgtaccaccaggcggcgctgtgatagcagggcaacagatccccggtgggacggtggtggggatggctatcttacatgtgcatcagagcgcggaagtatggggtacggatgcgcttatgttccgaccggaacggtggctggagagttcagatcaggcaagtgcccggaatgggaagagtgaattggatcactggctcgttgctttcagtcgggggccgcgtatgtgtttcggtatgaacttggcttgggcggagatgtacatcgctttcgcgactatggttcggaactttgacatgactattgacggcacaacggccgaggatatgcaatggcgagagtgcattgcagcttactatcctaataggcatttgcatgcgtggtgtcggccggctgggcccgggaaggtgaagtaaagagttggtgcttatatagctttgagtttatgagcaaatacaaactttctcacacgagcaaagtttctatcctctaatatctagccttatgttaggaacaaaattgtaagaccccggtcgaaagaaaataatgggctcgtattttgaatacgcctgcgggtttttactaccacaagtcactatcataaacatagcagacaactagcgaatttctttctcataaccaggtttcgccatacttgatagttctatatgtctaggaaagaaacgaaacagggctttgagagccaatatattctagaatatcagatccctaataaatgccctagtctttcccctatttgcaacaaattccttttttatagtttgcaagctagaacggagttactaaggtcaaggtgagactcactcatcaaagtcggccgctatacttggccgctcctccgatgcttaatagttctgaccagtttcggggggaaagagaaaaaggaacattataaagtccgatgtgctgatttgcgatgttttgcactcttagtatcacggagtagtactcgagtttaggtaggcttatatattcaaaatttccaccaatgactttgataagctaggacttgagtgttatgcccactatcgtcatagaattccaccatcgtcgtgtcgaccacaaagtctgcacgtgaaataggaaagtaataagagaagcaggaaggtctcatatgctacctaatataaccaacccatggcaacaaagagcggaccgacaagcattgcttcagtgtaaccatacatttattaatcgtactctaaacgaaaaaaagccaaatatgtccctgagagcccagagtcaattgtttagaccgtaaccctattagccttcaaatactcataatccggcatagaatctcgcgtggccttctcaagcaactcagcaatctcatccccaaactcgacacgccacttagcaacttcctcatcaatatcaactgacactggagccttgtccttaacaacaccagtcgactcctgcaaagtcgacaacatgatagaaacggtattcttacgaaacgctagctccccaggctcaccaacgtttgtactttcagtcgtctcggattttttcgcagagccagtccactcaaactgcatggacgcagtgtccagaccaaccttctcacagaacctaatcacagcaccgcggttatgaatcacgtcattggcatcaatgaccaaaggcgcgacagactcatcgggctgctcgagacaccaatcgaataacttccgcgtccattccatgctcatattcttgaccgacacacccttaacgtcgtcgtcttcaatgacaccggctttagacatcttctgcatagcacggtacatagatggccaagctagtgccgggtgacggatgatgaaggccagctgccaggtgcgcaggtactcgtccggcatgacagttttgttattggcagagaatgtctgcgagggcccgtagcgttctggcgtggatacattgaactctttcgcgttctcttgctcttcggcgctgtttatgtttcccgtgaagaagcgagggttgaggaaccagaaggcgtgttctttggcaaacattatcttgttgtcagcacgcgctcggctggagtagtcttctagctcgttgaagcaccgttggatggcggctttggtctcgctcttctcatctactgtccattgttctagcggcttgccgatgcgaccattctcgctggctgtcatgaatgcatcgtagaagaagtagcctcccttcgggttggtgaggacattcggttgtttggggatgttgaggatcttcaggagaagattcgaggcggtgcgaggcacactgacgataaggactcggtgtggttgatcattgttctcaggggtattggtagtaacagccatggtggatggctttttgatgtataggatatggtggctgaatgataattaagcttaacttgccgcgaggcaatgagcgtgagaagagatggctacattctggagtcggatggtgtcatctcacttaaatagattcgactcaccctgaccaagcgcaagatcggcgcttttcttgaccaaatttcccctggcccctctttatgcatgcaagtgggccgaattctgacctctatgtggtattcgaagtccgacgcggcgggggttgagcagatagtatttcctaagggagtcggactcggtatcaaccgctccgatcggtgtttgtcgctgttgataaacgccgagagagggtcgacgatgaggtccttgattggactgcagaagtgatcggcaatttacatcttgaagaaacagcaatggtacgaggtatgtctcagacctcggccttcctatcggaggatatgatcagtcgcgtcggatgatacggtccgtggtcactgatcgacatggttttaccttgagttatacacttacgttatgcattcatctgtcaaacatctgtacgtcgtgaatacaggcagtggcagtgtagagtggagcagcaagatttgaaaaattgaggatatttttgattcttaaggctggtctggagcctcgaaggcctagtcagagacaaacacagctagatatcgagttcgaagtacaacatatgaaccgctaaaggtccggtgtctatgacttgacaaggttatcttgtagatatactaagccaatacactaaagcatacgtttccgcaagatatatcaagtcaaacccggctcttactaaacgtactttcaccgaggaaagtcggaatcaccgctctcactctccgccttaaccagactctgctccctcgtgagtgtcgggttgcgaataactaaggcgaaggcaatcaaagggactgttaagcagatacccgtaatacatagcagacgctgtgttttctggtaggcgagaatgacgttgtctcggttgggagtacccacgggattgaccgccgcaaatgcaagaggctgggcgtagacatacgcagcgagtgtttcgttgccgagtctatgattcagttcagaaggcaagacttggttccagatcgcaccggagacagtatttccaagtgcgctgccgatgttgtaagcggcgaggtagataccagttatcacggcaagatctatgggattgttagccctagagtcttttttttttggtagaacaaagcccgttggcgagtactaacgttcgtgcttagacgcaacctgaatgctggcttgagctgggtaagggaacattccaccagctagaaattttcgttagatatattcaagcaacgctggaatctaggtgataactcaccaatacccagcagaacttgcgcaccaatgacgcctgaatgactggagtgcgcaacaccacctcggaaatagatgaggattccgaatgcaaccatgaagaggagggttccggccacgatgaagggcttcaattggcgaactttcataacaatgaggccgagaataacgccagtaataacagaaacaaaactgtaaagagatgtgatccgagtcgcactgagaattgattcgtcgaagctcacgtagagaactgtgtacaggaaatctccttgcaggtaccacgctacacaaatgttaaatctcgaccatggatggatggtatcctgaaggacgtaccagtgttgagcataatggggattccaagggcgccccagacagcacggtctttgagaagctagagtcgaattaaatcggtaagaatcctaaatggcttcaatcatttgacttaccttgaatggcagcatcgggtattggcaggttctctcccagaaaatccagaccgggatcagcaaaaagcctatgataagtggcgcaattaccttcgctgtcttccactgtgcacttacgcctccagcgagggtgaatggaacaagaatacatgccagcatggcaatcaacagaatgtttccgacgatgtccagatgccagaacagttctacagccagtttcttttttcctagcagctggagagagctcttgtaagattcaagtgccccagtcttcttcgcgcgtcggttgacgataaaaaggactgcaataagagggagagcacatgcgggatagattatagcaaacatgccgatgccccatcgccatgtggtgatcttgagaacggcatctgtcaagttgccgctgatccaggtattgatctaaaggagattcagtaaattaatcagttagcgtgtaggattacgtatcgtacgcacaataaacggcaaggccgggatgtaggagaaaagaagacgagatcggctggaagtcacatcggcgattagaacttcgactagaagcataatactggtgtatccaatctagacaatattagacacgggccaagatttcatgagcgtatatctcacctggtagataacagcccccgcagcgaaagcctccaaagtcgttgcgcatgcctccactatagtacccacggtatagaagacgatcgaaagaaggataagttccactctgccgaatacatctgcaacctttgccgcagtgggctgtaaaagaatagtcagctgctgtgatgaattgttggtctctggatatccgtacctgtgcagcagcagcgatgacggctcggagaacattgatggtcgcaagaagactgtgttcgccgtaactctgagtagcatagggctgttcaagacatgaggtgttagtatactccattctcgtcgatatatcttgacgtcagaactgcgagatacgtacctggtacgtgtaacgaacagttccatccaagccatacacataagcgatcaagaaaatagcaagaggaagatccgatcccaaaatcggaagtgtgatgtaatgatttcgatacgacgaacacccggactgcctttgcctagcaggctgacaggctcaccaagcgggatggcttggttgcggggctccttcgagtcctcactgacgcggtggtcaacgttggtctcattaacgagggacataataatcgtgcagaatcaggtctcactcggattacctatgtagagaggaagaacataggggaaagaccagaaaaatgaaaatatgactgccaagaaaaaaagtctaagataaaactgcttcctcaatcttatctgatgggcctgtcacctgtctaggtaggtaccgaggcgcgctaggagcgtttgcctgggaaaacgtccactcacgcagctttcatgtggcccacctcgtatagagccatggctcaggcttgctatttgacacagatttcccgctttgggcttggctagtggcaattagtataagtctgtggatattgtatcggatgacttcctattctagcataacaacctcgggtcttaggtgaacgtgaagagaagatgtcatgagtgggcgactaactgtcttggtatactgttataagccatctatgtgaactatgtccttgttttgcaaagtgtatacataacaagaagaaataaagtgaaccctgttgaaccctgtccaggtggagctggccccggattaaatccattacgtaagaataatgcccgcaccacatggctggacgcgtcttggcggccgtgaaagcccacaacatatcagcaggctcgcacggacatgcaaatcttttcatcaaaatattaaccatgttatatagcagtctgtacggttaaggcaggtagagaatgctcgccgttttgccaatactgtgtccagtcgcccaaacttggcagcacttgtcaaaggagtgcgacatgccggtgatatgggctttgcagactttgctggctactccgactttctacgaagcgctcaccaaattgaaaaacctacaaaccctggccatgagagatactctccgcccaactaacgagtacacgccacaggcggcattactggcagtgcttaccgaaatttactaggaggcccaggactcacgggtgagcaattggtgtttggaagatttcatgatggagatggatgatcaaggttaccctcttggcgatgcgttggatccgtttggccttgattccatccttgtgaagtggacttttcactccaaggctgggcgcaagagctggccgagtccacatatttcagccgagactacctcaaggacttgattcccgcactgcgaacatgtaagttgcccaatttcggggcttgtcgaaaatatctattcttacataggaccggtcatattggaactgattctcctgacctatcactcttctatcgattttaataaggaaatcttcacactgccacatttgcaaaaactctgcatcactggcgctaaattttgaaaatttgggttgcaagaagcatcaattgacaatcgtgccgcaagtctaaaagagttgctgcttctcaactgttgtgtgtccgctgaagatctcacgctcatcgttcgatttccacgtgccttggaacggcttaccattagagttcctatgtcactaaaatctcagtacgaggaagacaattatgtattcttctctgggagattgagtttccaacattctgaatccttggagtacttggatttagacatttatgggggcgcagatcacggccttgacctcaacccctttgatgttctcaaagaaatcataatcacccctcattcaatacttggtgatcccgatgaaaaaatgatcatggcacgtagtctccagcgacttacaattcgatacgaggaagggactcgtctaccactgaattctatcctcgaagagctcgagaagaagaaccttcccaatatgcgctctgtgatatgccagatacccgacaatatctgcgaaggtactaccagctcggagatatgcgtcgaggccgaggctttcaaaccaaattccaaagagttaggggtggagctatcaacagaactcgttccataccctctcaccatgccgaaatacgatacctgcccgtgtgaaaacttaacgttcttccatcaattcccctcccatccccgtgtcaaatctcgcccaccaaacgaacatactaccaatacaaccgatgcgggtcacagcaaccctcatcccgctggtgtgatttccttcgatgactatgacccatattatgatgacccatacgagggtaaccatccttccttgtatgacatgagcccacctactcctccccgaatgcctacctttacggattacgatgactattgtgattgggcgtacgattgttgactggaggaaatctccgtcttctctttcagggcgtgccttttaacggtacctatttgtttgtttgtttgtttgtttgtttgtttgtttatcctatattctatcttcggtctttcttcaataaccttcaacatatatttggctacgcgccgccgtgcggattgatgctaacggcgtagcggcctgaagtatgtctacgtctgatttctaggatatccttgatggagtctttgatataactggaagccgtgtctgttctagaaaagtacaagatccagatatgttgtagaattcaggcttacatgtgcgaggataaatatgaagcgaagttggacaattgcaataaaacttggctgtaagtattgcctggagatgaaagcaattaaacctatatttgaggacattatcactatcaaagtcgtgacctgaatgaaccttgtgaaccaatcggcgaaggcaagctatcctgactgagacgattcatctcgggatcataaagcgactctgcctcaacagtcgccttgatgcgctttccaaaatactcgatctctactgtctcaccttcaccaacacccccaggaagccaggcgtaggcaatcggtttgcgaatcgtgtatccaaatgcagcggtggtgacatatccagccgcctttccattatagaacaccggctccttgccaaggatcatcgaccgaccatcatcaacggtcaaagcccgcagtcgccgcgaaggtacttggttggaaaggcgctgaatagcggctttgccgacgaagtcatctttcttatttgcatcgacagcaaatgaaacaccagcctcgaacggattgtgctctgtcgtcatatccgcgccgtaggtccggtatcccttctcgaggcgcattgagttgaacgcactgcgacctccagcaatgagtccgtgtagctttccagcttgccaaattgtgtcccataggcgctggccatactcggcgctggtttggatttcccaacctagttcgccgacataggactttcggatcattgtaacagggatacccgcgagaattgttttcttcaaagtgaagtagggaagtcccttgttggaaacgtcgaccgtgctgattccagcgataacatcccgggatcgaggaccccacagtccgatgcagcatgtgctgcctgtgatatcgcggacctgggtccatttcccgggggcaccttgttcctggactcgagcttctctggtaagatacgccagatctgttgcagtgttcgctccaatttggaacacatcgtcgtcaagtcggagtacaaaaatgtcaccccgaatgccaccgtgatcattcaggaggagcgtataagtaacggttcctatcttggtggtcatgtcactcgtagtgaggcgctgaagcagaccgattgctccgggaccgcgcacctcgaaccgatggaaagcagtcatatcaaacatagcaacagcattccgcgtcttccacgcttcagcggcagagatcggcgaatggaactgcgccgaccaggcatctcgttcgacaggttgccatgatggcgggagagatttgacaagatctttgtttgcctcataccaccacggccgctcccagcctccaacctcgaggaagaaagcccccagctccagctggcgaggatagaatggactcacacgcaaattgcggggcgacgtacgcggctgaagtgggtggacgatgtcatatatttcaacgaagttctgctgcgcggtctcgctcacgtagtctcgattgagttggatttcttcgaagcgggatagctcacattcagacacgtcgatatccgatcggccggttgtaagtatttgggctagagctcgggcgacgcctgctgagtgtgtaacccatacggcctcggcgacgtagaagccgtcgaggtgggatggttggccgaggattgggccaccgtcgggtgtgaaggaaaatatgccattgaaaccatctgcgatctctgtgtcccttagagcggggagaagctcttgggaatctttccaagccgggtcgaaatcttcggttgtgaaatcaaggcgggaaggcatgttttgttcgtcaacatctttcggagtaaggcccaatgatgacgcaacgacgggcattggacggtgtgcgtaggatccaatgccgtactgcccgccgtgttcacggtagtaaagacgcttgtcctggtgccggaggattggtagtgcggcattcattccattgggcaagctgttaacatctcgtccttcgagagcaggtactgccgtagtctttgcatactggtgccccagcgggagcaaaggaatttccacaccgaccatggctcccaattcaacaccccagaacccagcgcaagaaacaacaatgtctgcggggatagtgccctttggagtagtgactccggtgacacgtcgaccgtccctctcaatccccgtcacgggggtatggcccagataacgaacaccggccttgctcgtccgttcaatcagcagttgcgttgctcgggctgctagtgcgagaccatcggtcgggacgtgcagaccgcccaacaccatatcggtattcagatgaggatacatcttgaagcactcctcggcgctcagtagccgcgccccgattccccatgatgaggcatatccatgtttccgcttcagctcctccagtcgtgcgggagttgttgctatttcgagactgccgacctgattgaagcatttgtgtccatccttctctattgaaagaagcttctcggctgtgtatcgtgcgaagtatgtcattgtcttggaggggcttgtctggaatacgagtccgggggcgtgtgaggtcgatccgcccggcatatgcaacgggccctgctcgacaacagtaatatccttccatcctcgagagaccaactcgtcggcgaggttggtacccacgatgcccgctccaatgatgacgacacgttgtgaaagggacattgttatgtgatatatgatagttaggtgttacacgcattagaaagcggcaggcaccgcttctatttgtatattcatatacttgataggttgtacaatatgtgaaattctggtacgtatctccccgcaccgtgtatcggtgtgtgataagtatatagtgtgtcttgaagctgacgataaagatattacaccccgcacgggttccggcgatgtaaagccgagaattgtagtaaagaataccgatgccattttcggagcaatcggaatggaggggtatatcgttggatgccccacgttcctatagataatgaagcttgtcaagtcaatcagaaccggccaaccagctttatgtggagcatttgcgttgacaatggataacatttccttttcgggtcaagggtctcaatcttaggctattttaggatgaagggagcgtcataatttccgcattgaagttagaattattggtttgcaatcaaagccgcatcaaattacagcaagtcaagtctacatgttggacggtttatggccgaaagtcgcgttctgaaggccacgaaagcagtgtatcgatccgggtcatactttgaagaaagcaggagtgtgccaaacatattgtagggctttgaactatatatattgagttaatactaatagatagctagttgaatctaatcactagctatccagttattttacaggagatccgtaggaaatagcaagactcagtctatttgagatacacttactgcttgtctacgtagaacggcgaactctgtgcacgcatacacgcacttaacttgtgcctagaagacgctgtaaacgagttcctataagcacgataacttcatggacagtgctgaaagaggcgatcatataccctcactatcaagcttttccgttgtagtcgattgcgaaaataaccattctagttagtttacaaacacagacccacagtctcgattgaccatagcgtatggtaaaagttcttgattgccctagcaatctccggagattcagttaaaacgtcaaacttgtggtctacaactagtatttaagcaacggtatccgagctttaaacggatctaaatgtttagattcgagctagctacttatagtaagataataggtgatcgtgcaataaatcgttggtaatgaagcattgtcattggcagaacattccaacatcatagacgaaaatgatgcaatcgccattctatggcctctgattggccaattgagaatggatgcaggtgcgttcaatggaggcgtggagtatacaaatcggttgcttatagttctggatgtgacatgtatcgccaacatctctgtctatgaacttttatgatacttaatgatgtcctaaagaacatgctaacccccaaactatgcggggctgatgttcgatgttcggcgggagccgatccgtgggggaacccaacaagaaacaatccatctgagaccttcaccctttctcaagagaaacacctcagctggaggacagcaatgctatcatctgcattcttcgcccatttctcatcatgaccgagcctggccaaactcctattcccgaggagccacctaacgcaatcctgaccgactcccacccgactcccgctcgcgacgcccgcgatgacaacctggaagcattagagctccatgagatccaaacgcgagaagacaatgagctagactactcaaccccatcaggttcatctggcgacgagaaccacgtgcccacacatcgaactacgtctcaacgggattcccggcggagacgcgaagcccgcaagggcctttggagccagatctgtcgattctggactcgaaatgttagtataactgtgccgcagaagagcaatcgagatcactttggtatgttgtactttggacacgctgttggcactctagttgacatgttcaaagccctggaaaggacgttccttgcgtacatccgcacgtccatggttatcgctatgcaaggggtgcttgttgctcaacttttccgtctacaacggccgttggaaacggtccatcgcctgtcattctaccatgtcggtatcccgcttgcggttgcctgtcatgccgtggctgttatcgtcgccttgataggttcattccgattctggagacaacaaaatgctattgctcgtggcaaagtttatgctggggggtgggaattaaattcagtggggattttactattccttgtaagtcatcactaggacgatgctcggcctctgaattctaaccaactctacaggtcattgtggcgactttggtacttaccgtgattatcttgattgaaaccaacttgagccccagtgttctttctaatcgaatatcatggccttgatgtccattgaaatggtgaaggaaaattttacccaagatgagcacattaatgagcatacataatacataatgaataattcatacttgtgatattattctatgatccgcatgtttttcaaatccattgccgttcaaagctgtctcgctttgtcgcagattgcattcatttctaccttcgagcgttctgttcaatgagatcctcaatgggaacaagcgttctctaggaaagttgcgtgaaccttacctacttgttggggacgcctcccaaacagccacctagcctgcgtcttctggtggcattccctcccgagcatgaatatttgcgccgtgttggcatccccaggcagcactaccctgtcacccattgggcaagggcaagaagaagcgtatgggtgggtatcttttatacataatcaacattccatatccccgagtatggtgacgtttaaactgcctacggccctacttagggcatatattacgctccaaccccccgaatcaacctcaattacttcgacacccagtagctggcacattaccttcaacataatcacacccattggctgtgttttcatgcttcttgatcctgctatgagtaacaccaatggcactgccagatcccaaagtcctgctgcaggtgaaaccaagcgaagcaaccatgcaatgtaagaaaaggataacaattagcatgccggtggttttccgcctctgtcaggtggagagaatgttacgctttttcttcatgatcatcgaaaggaaaatgagaaagaaccgcagtcttctccatatccgtgcttgaatattccatcaaaccatccttgatgctctggatgacagctctactccgttcaagttcatcctcatctgaaacccagccaagggcatctgtcccgattagatccctcatctcgcccaattcccgtagtttctcctgttcttggcgataatccgccgaacatttctgtatctcttcctcagaaaagtgaattggacactcagcagatcttgtctgtgctcctccatctagcgacataggccaattcttgaggacctgtagcataacatactttaatgaggtagagtctccctcccacggagcctgtgcatgatgaaaaagcttcgctcgaagcatataattttcggttctgatggcgtcaaaatgatccggtagggatttcatggtcaatgcagtataatagaaatggacgatccgtctccgcatcgtctcttgaacagtttcctgttctttatcgctgagttgatcaaaatttgccggcagcttgacctctggcttagacaatgtctcggataatggatcgccccagttttgaaaatgttcggggattccagcgcataaacagaggggtagaattactgcatgttgccagtcaatgacccctaccatatcattagacgtattcaccaagatattattaggtgaaaagtccggatggcgaagagtcgggcgagacatacggcctgataggacgtcgaggtagggcgctaacttcaaataattggcaaggagatattggtatagaataggcgagaggctttggaactggtatatttctcgtagatatctttcgacgtgtaggcgtggtttaccaaatcttttatagaattctatctcgcgctttgcgggtgcttcgaagtatacggaaaaggtagtccctggctcaaagtcaatattactaaagaaataggaactcctagatagagacttacatgggccacggtcaacctctagagaggcccgttcttgataccaccattcatgctgtacagttggtccaacgacaatatcgtctgagattgggataaagtgttgtgagctgtcgagatcacggcggtaataaagacttccgcttgctgggaagtggatactcataaaccgtctctccatattaacaatctgtctcattattttgacccgagttttggtatccatagagaaccactggtcacttaaggggattccttcaagcctttcaagtagaatatattcagttctaacgggatttgtctgatctggagaatacgcaaggactttaggggctgggaccccatgagcacgtagatgtgtgagtgtggcagcttcgctagccaccacataatgtttcggaatagtagtcttgtatggcaaccttgcaagaactgcatatccatcattgaaggtgagttgcaagacgcggttgaagcccccctcggcgagttttgtgatcgaggctacgccatcgaggcgtcgaccaacagaatggcaggctgcccttacaagggcatccacgtcaaattgaatacagcgttcagcgcggcggagcttttcattaaatctagtttaacggagcaagttagtttatcgcaattgacgcgttcagcaaccgtcacgactcacaaaaagcgcccagaagtgtactcgaacagatcagaattactactcatagaggacattcttctgggtaatgacttcgggtatcgaccccaaaacctcgagaagcgtcgcattttcaaggagagggccagggtacgcacccagctacatttccaagcttaactttaagttacccgtggacccgccaacatgggtattactcagcactaacgcctcaggtgcccaccgatagacccttgtttccaaggggtcaagtgctgaatcagcatatggccggcctctgtatgttgtgtaacgtgccaggtctaaaagagaacagtgcattcaattcaaaataactaagatggagagaaataagaagcaagttggaaagtgggcagcagccagttaatatagctgaccacttccaagcgttgcaaacctcgaacatctcgttcagctatgtaacaaacaatctatctggtaaacaatgcaaacagtaggcgagcaagcaaacatgaagcatatgatagcgatccatgtggattgtgacatgttgtagttaattattttgcgatgaggaatctagctagaagggccacgctcaagaataaacattgtaaagccctatggattaagaaacacttttggtcttttctaatgaagatacaaaatacaccgatattttctaatgaagatacaaaatacaccgatatcctttcaaatggtcagcgattagaactctatggtacaatatgaggactctcatatgatactcgggccacattgggctaagtattctaagaagttggtaaccaactatctgacgcagaaaggtaggtcaggtcatcagatttagcacgagggatatggtatggacatcaatcgcaccaccattgcactacctgactgattgcagtggcccgtataatagaccaaaagaagacgttcagaccaatcatcactgtagcaggggttcttgcagttgaatggggctgggcaaggctaagctccggaaaatgccttttatcttctattctctgttcattcaatgaaaagcaatatactgtcttcgaaaaacatatgagagtcctagattcatcaaactaaatggatacaagacccagaaggtttcaggcgacgatagccttccttctcatctcttctcctctcctcctccctcttctctttgctgtgttatcaaatgaccattttccttgacgactaggactgccttgtcacagtgagaatggaacttacaaagctttgtaaatgtaggaatagctaactgcccataagccatgcgaagaggccagatgatatttatagggattatgacaggacggcataagttacatatcgatgtagacgaacgaagtaactgggacctgctttgcatcatacacatggtcagtttattatgagttgagttttctaccaccgaaattgtatgctcgtcactacaaagtacacacgtactgcatatatttttatgaagaaagattatttggccgaagatgcatcggaacaaaccttcccgagctctatcgaactatgttgtataataataatcggccaagccaccgaacaaaatttgacgtcggcgctcggttcccgttcgaaaccgtttcaaatagaaacgccccataaggtcctgtaaggcgagacgatcattcacccagccccatttcgaattccgacctttccgacgcagtgaacatcgacgattcttgccacttcgggcattagaccaggacatttgtaggcagcaaaggcatccttcctatacgatgtcggatcggcgagccgtgccgtcacatagcaccgtgaaatactacaagatttgtacattgtacgttgtccctacattgtaagctcagctgtctaccggaagccctcggtccgcaagcggagctaactggaccccgcggcattcgaagcggagactcatgccgggcatgggagtgtggaacaggttatcgtcaaaacgggctgataccgcaataacccaatacgaagtacggagtacggaggagaagaaagccacaacgctcaggggctggatgttgctcggattggcagttgatagcaaaaggtacgttgaatgagggaggtggggactccttatggacacttgtcagatgctctcgcagacaaggcggtccgagatacctaaaaaggactactggtcatgtcgatgtattccaatactcgcttatttagtttcttggcgcgcattgggccgctcggatttccccaaatgcgttgcttcacgagggtgggcttcttggcaagtggcgatccagccttattttttggatgtggatgtcttggctctttcaggggaaagataacgggtcatttttggactcgtttttggtaataccatatttgaattgatggctgttttagtaggacctcggaagtcaagagttgtcacgcctcctttttcccttctggggttaattttcaaagcgagtcatgggacttgagttcatctggggtatttggccatagccgcttgggcaggctgcatcacttacgtgtctagcaagttgggtttcattatcattggttttatacaagtcattcgggtattgattttatgttcatatgtacatccgaaattatccacagtcactgatagttctcggcttcgttgtctccatttcatagagaacagaagccagagagagaaaaatgaaacaccaagaatgatctgagcaaatatgataaaagtatgctgaaaggaaagaatcaaaatgtgaatcatagaaaagaaaatgcaagatatgagaaataaaacagagtgtcatatagacacttgacagaaagcgaagaccgccagggcattgcttcttaagaaatcattccaacgtctttaccaaaacgctccaaaattaagctgtctgcataggaatgctagtcatgggcagctggggcggggcctgctcaccctcctcgaacatccacttctccaatttttgcgccatgcgtgcgcagaaggggtcaacatatccagtccacaaggtggcgcagaagtagaccagcacgatccaagcggggatactgatggccacgacccaaggggcgcggatggggatccagtgcgggtggaggggttcgccgtcctcgccgtatatcgggttgcccttttcgtcgacaatgtcaccgtcccagggctggccggtaatgccgtaaagcatccagcaaagaacagtgcgcaagagagtgccgtgcacgaggtaaacggcgaaactctgcttgccgagccagaggaggagacggctggagaggaattccttggtggagggagagatgtagatggcgaaaattatgaggtcgacgcccaaagcggagtagcgtctgccgacgttgacctccggaggaaagatatagtgagaggcccgttccatgtaggccgaccatgtagcccattctgggtgttctccggggtacgagcacacgaagagaccgaggcagaccaagaggcctgctacgatcttgcgaccccagctgtggcgttcgacgaattctttgaaaccgttctcataagagagatcgctgaggaacatgccgtaaactgcctgcatttggaaggtttctgtctcttgattaggaccaggggtggggatttgggtttcgcgtagaacttaccggtgttcttggctgcgttctggtggaagtagaggtacatgcctacgtagatggccatgcggaatcggaacttgcagaacattgtcgcgcagataaggacgtaaaccagcatagatgcctggagcagcggaagtaaagcccactggtggtcatcgtacgccatatagcccgtggtccaaacttccaggaaggtcttgaacaaccgcacaaactcctcccagaaagtaggcgccagatcgacggcggcgtaacggcaccaccaacagtcggatcgattagcggcgacgaaggcgccaaattgtgccatgacccacgagatgagcaaggcgatagtagcggggaagatgaggcgaggtggacgacggaaggcactcttgcccacggatgtgaaggatccaaggatgtcgccattgcgagactgtttgagcggcttgagggcacaaacgtagccagtcaggaaggcgaagattgtgacacccaaacggccttgccaaggaatacgcaagacgggccactgcagaattcggggaggggagtcaacatcgtcgcggggggcaaagagatcataatcccatccgcgggtcaggtgagtgaggataactaggaatgaagcgattcctcgtaggccctatccacgatgttagtaacaagcctcatccctataaggctgagatagataacgcacatcaatccacttcacacttttccgcggatcacctttcaccgatggatctgcggacttccagggaatgttgtccaatatgcgcgagtatagatgggtgggctgaatatactccatgatgagtgttgtaaagagtgaatgagaaaccaaacaagtccgacaggagactcggagtgtctagtggattggttgaaatggaaagccaaatgcaaccatcaacatcgaacgacaaagctcacaaaatgccaaacaaaacaaaccaaaatgctgaagattcaaaggagagaggaagggacagagatgaggttagctcaagttactgagagagcctccccatagatcaacgagcgagaagtttcgaaaataaataggccaagacagcagaacggggtatatgtaagagaaagccgaattcatcttccctttcccacgagtcgcggatcttggccaagcggaaaatgggtacgaggcgatcgaatgggcgtgaactggaacttgggggatttaccttgttgtatgtaggtatcgccgtggggcctcggtagtggagccttgaaattaccagttcaatacctgtgaagatggcgaaaatgacgaagtgacgaaagtgaagtaaagtatacgatgcctaaatataactggaggggttgtgccatgttatgtttgcagttatgtaaatgtcgataaatgatactacatcagaaaagagctggatatacgtatattgtatgtatcaatctacaacatagggatgagtattgcctccatagttacagcatatgtacgaatactccgtactcgtacgccatacgccatacgcatacaaacaagggaaggggcgtaaattgaagctatctccagccacgaactaaaccatcttatgtagaagctgacgacgctctgcgcatcaattgagctagtatcccatctgccaatcaacacgctgtattttccccatatgaaccatgggctaaaggccgcctcaaattacgccagatcttggcattgatcccacgcagcccaggtctgcaacctgattggccagggcaatcccaacggcaaatcggaatcggggcttccaattgatttaatttctttttctggaattcgatgcgcactggcgttaacgctataccacttcgattcggagtaaggggatggaatgcaaccttggaagttcacccctatttcttatttccgccaaatacgagaacgagagggcatttcagtcgggtacatcctatgctgtatggatgtatgaatgtatgggtgttgtatatcttctatggatgtgatatggagtacgttgtacaaagcactccatatggagtaagtcatcacgttatctgacactcggactccgtgaagatcgctggtacctcgggaacttttcgaatatcaccgtgaacgcaggaatggtaaataagagccattggattctacagataacaacattccgtccctgggaatgtaccgttgaacttgatttgaaccgaatgaatttgaaacatatattgtaactcaataatttcgtattcaaccaaccaggcggagcaaactcttggcttcagtcttcagactctactccgtactccatagagctcacgagactattgaaaaacgggtctactcaatcacatgacaacgttgaagctggctattttaggtgatattaattacttggtaagcttctcaatcttaatttagttattacaagtcaataaaatagcatagttttactccgaggatacgtaagtggtgcacagcaaaaaaaaaagacctcagccctatcatcttcctgcgactgtgtcccgtacaacatacgtgttagtacgaagtctctttgtctctcggtccttggcgacccatttatttagaaaaccgaaagtctaagcggttttcggtaccccgtagtacatattcatgttatggtacaagatcgtctgccttgtggtcagaggtcggcagccaagagtttcccctgcatgacggggagatatgtgtggtggctgtcgcatttacgcatacggagtatctacgtattaactatctacaacatacacatacatagctaatccgtagtatgttctagaaccggcatattccgcctcgtgtggaccggtacccgcttttcctcaatccaaaaaggtttaagggtctcgggaaattgatcagatagggttctccaggacctccagggctgtcaggtatcatacccagtaatacacgtgacaatacacaggtgcttggcaaagtcgggtggtggcgggccaagatcacgcaattttagtctcaacccgacacatccatttagacccatctgaatttaccccctagttcaggagaacttgatggcttaggggtgtacgggacaagaatatccagaatccacaactttgtcacttccaaaatgcggcttgcacgtacatttacgaccttgctggcagctgtggttgcttcggccaccattctcgagaacggtcaagtgagagagaatgcatatcccggccagttacaaccggtgactttggacgattcatggaggaactatcccgcggatgccccggagatctcttacaaaggtcgatgggatagtcaacacatctcttgtatgttccccgctcctcttccccggattctggttttaaccttaatgctaaccttggaacgaacctcagggtggtcgtatgtatgactcgctattattttgtcggctttactaagtaatgatacagtgcaccgggaatcaaagtcgagttctctggggaaaaggtgcgtcttgtttactccgattaaccttaaaaatggggtccacatcgtaacatcattctagcttgccgtccacttcggcccaagcaccaacacgggtgttctggtggcctaccggtatgcatacatctcactctttatgtattcattgtgctaacccttgacaggattggctctcttgattggcaattctctaatatcaccgcctcctccacatatcaatttgttggtccgtggtcagagctcaaagatggtgatgaacccgtcgacaaaaatgtctttgagatgagaggtgtgtatcccaaattccagtggtaacctatatactaactgcattacagtcacaaattggggcattggataagtctctccctgtcgttcaatctgttcgttacttaccgtccacacagtccaaatcgctggtgttgctgtcgcgaatgacgccgtccttaccaaggccccgaccttcccaaagagagttgagattattgggggctcgtaagtttccacaccttgccagctagtcttccatgcaactaactgtccccaaggcttgcatctggacaatttgccacctacgagacaatctcctcgtggtccttcctcttcgctaacggcttaggaaatgtcgaatacggcatcacggtcagtccgctcccacctggatttctgaattccgaatatgctgacaagtctcgcaggcctatcccggcgtgtgtctcgccgatgaacaatgttacaacggcggctctcgcggtgtagtatgtcatcaacctcccatttcccctagaaaccccatcatcaactaacaacgccactagggatggtactggcaccgtgcctcggacccgggctctcgtgcgcgatcaatctacgaccgcaatcccgagaagtgggacgtcaaggcagagcaaccggccgatcttgtgatcattcagatgggcggtaacgatcatcgccatcccaacgaaatccccggcagggattactaccatgcctacgtcgacttggtcgaggatatccactctaactggcctaatgcaatcatcatcctcatggtatgtacctcttctattcacagcttggtctgtaaatggtccatccgactaacttcaacagtcccaatggggaggattcaccaaggaaggaaagaagtacgtcggtagcacttactaccaggaagagaccagggaagtcaatgagcacttcaaagaccgtggtttcgtctactatttccccaccgagggccttctgcagcataacgatatcaaccccaagaaccatcttacggatgtgggacatgttaagattgcgagtcacttgttgcagtgggttaagttggttctcaggtggaaccttgagcctacgggcgaagtccaatctggaactacctactggaacgatcagcaggaatactgattgttctgagatactgaaattggggccgggtggttatctggcctttgtacatttatttattgatactcggcgcggtgtagataaactgcaagaacatatagagcatatatggcgccttttggcattgtactttttgcgcatttaagtttcctattcgaagtcggttgaatatttattaatatttgaaaggaaggcatattattaggtaaagctcatatatataatatataaccgttgtcgtaatatatcacggggatcctcaaaattattccactttagagaccgttaggaccccataatccatggcggttctacctacccaaaacactcccaattccggtggcgcactctaacgagagagataataggagtgaaagtactatgtactatgcaccgctattacaaactagtgtttatccaaaaagcaaaaaaaaacaaaaagctggggacagagttattggatcgacgtccgtacccaagttgtttgtatgccgctattgattaccgcatctggatacctccaagaatagggcaggagtcatagtcaccaaaataggtaggtatagtaccaaagatattaaagtggtgaaagctatttcgatccaccccgtatcaactcaagcgttgaaatattgcatcaagcggggtagtgtgtgccttgccatctttatccgatctatgaatgtcatccccaggctgtgtgatgtggcttgcatcagtgtttacccaaacaggttaattctccaatttattttcgtggtctttcttcttttcctccgctgagagctccggtgtattcgaaattagctgcacatgtttatccagtggatagcgccgtaaaagactgactggcacccaacaatacttttgcggtgcacctttcaagaacccttccaagatggccttctccaagctgataggatgcttcaacatccatagcttgattatttcgtagccatatttggacttcttcgtacccgcgttgaattccgtattgccaatcccgccgtcttccggaacctcgcctggaattttccctggggatatgcgagcgacatacgcgatttgcttgacggggagagtggtgtagaaccagatgcggtgaaccttctgcgggagtaggtaaccacgatattcatggttcttcgcgccagacgcgatattgcccatgtgctcgggtttgatgctcatgaagatatctgagctcgattttgccattgcgagactcggcatgaagtgtccaactcaaaggtattagatgatctcttcgtggaattagaaatgtgcagcacagaaaaagctcaaaaggtttgatttggcggtgagtgctctaatccgaggtcagttggtagtctgatcggcgcccctcacagctgagaggatagtcacatttggcctgaacgcggatgaaaaacagactgtggaagagccagaaagtgctaattatccatctcaatttgctttttattgagattatcactgtgaatcagttggtgtttggggaaagcccaagtctccggaattttggccttgcgatgaaatagtcaaatctgtactccatacgagcaccaacacaagcctaacttccaataattcatgcaagtggctttcctctgtgccacgacaatgtttgagtcaggcaagacgacggagaatggtcaaataatagcatgcaccttgacttaggtcattggattgtgaagctggtcggcagcgcttattgtactgagacgtgggcctgaagatgtcatcacgggcggcccggcgcttcttagcgtgtgacgctcctactttgatgatgtgcatggaagttgggccatgggattgcactctttggtgtgtggtgggaaggacgactagggtcccggctcccgatggcctagtctccgaacttcggtccggtcgggatttatgtacatcggcctttctgggtggagatgagagttatgcatagatctgggatatagattgtataaaaagagatcgactgctcttgcaattctcataattctcaagtcgactctaacaaggtatctctacaaatacctaaattcaagactgaattgaatatctcctattcctcctattcctcctatcctttcccatcattttatgcccaatagggcaattgccgaggtatccagaacatttcattcgccaagccctttatgttcttcccaacgatccacatgccataaaaagattggtgctggagatcaaatagtcccaaccgttgttgttcgaccaatgctatatctcctgcaccgggataacttccacattaggcgactggccactggagcagattttcttgtctttcttcttttttttttttaagaacactggcatataacaagaccgggccaacaaagacttcaaacttgtcgcacttttgaagtaaagttagatcaaaactatccccttgcgcaggtattactctgcagcccatactttcacaatggttccaaaacccattccattcccgggcttcaccccgatatctgatcgagtataccttcgcaatggtcacgagaaggccaaaccagctccagccgacgagccaacaacgattatcatttccggctggggcgacggcatgccgaaacacgttaccaaatattccgacggctaccatgagctctacccatccgcgcggatcatcgttatcctatcgactaccttccaggccaccaaccaaccagaggaagccagaatccaggccatgatgccggtcgtcgacaccgtcttccctacgccaaccggcagcggaaacgaaaaggagcgccttctcctgcatgccatgtcaaatacaggcgccattttcactgcctccatcgtcgtcgcgtatcagcgacgctatggaacagacaagccattcccccacgagctcttagtgctggactccacgcctggaagtctggacttcacgtctcaggttacccggtggtcgcgtgccatggcggtcggcacggccaagttcttcccttggtccttcattatcacacatggtctgtggtatgctttcctctgggcgaatttcctgtggcaactcttgagcggttccgtgtcttcgggcgtttgggcggatggaatcataaatgataagtcttgcgtcgcggccggttctagcagggtttacctttactctaaggaagatgagattattggttacaaggatttggaggagaatgtcgcccatgccaggacattaggctattcggctgatcttgagatgtttgagggctcgccgcatgtcggccatatgagacttcatcctgaacaatattggaataaaatttccagctcatggaagcaggccattgcgaaataaggtaccctggggactggatatattgcattttgcatttatatttatagcttagaccatgtttaataattgtatagagcgatttcattgatagtctgattaatatcacttgctagtttccagaacaaggttgatctccgggatgtcgattaagccctgcgatccgctatatcggtacaagacttgtcttaggttatacttgtttatacaaaaggaactggcaagatattcaaaggtagcaattcgtaagtcaatagatcagcactaacaatctgggccttccaaggcaatgcgaaatgagtacacaaagacaacaccacatccactccactctggaggttcaacctaatcacgatcatcaggatggaaaaccaatgctcgcacttcaatactctctcttcccgcttcatgctccgtttccgggttaacaaaagcagtatggggcacacgacgagctcttccatcaaccttggaatcaaaacatttgataagtgtcaccaggtccggagtctgcccatagcggtaataccacttgatattcggatcgggcttgacggcatatgtctcaccttcgcggtctgggtatatgagcccgatgggaacaaggtcactatctgggactgagtgggcatccgccaccgccaatggatccttcaggatggttttgatcggacgccagacgttgatgatctggtatcggcccttgaggagctcgggagcctcgtctgggagatggtgggagactctgtttttggacgcagtgtaggattgatcaatgtgtacgcgctgcacaggtccgcggagctggctagtaatggatctatcagtttgggcccgtcggatggtatggtcgaagatgaagatacgagaggcacccgtgctatgtaggtcattgttagtttcatttgagtgatgttgatggcttcaggagtgcatacgcgtctttaagtagttgttctgtttccgggtaatattctctcttgatcttctcatcgtctaggaagtctttctcttggctttcgtgatagtaaagctggaatccatggctgtctagcttgtagtccagctcatggccactgatatcgtggatggtggtcacgagaggaaccaccggtcgatcataagtctctggtttgccaacataagatggtgccgggggagagccatcttcgttctctttgtagaagttgagtgtagcctggacatggtgaggcttttcggagactgggactctggggttttctgagagcagagagccgtgagaaccaggaagttgaacagctgcagaagccatagtgagttatttgcgttgtaatttaatggagcttggaacagatgacttcgatagatggttctttatatagcagtttgcggggtgagttctatttgtcagaatacagcacgcaatattcgtatgacatggagaaatgctgataaatgcatagctttgagggatacaagaatcaagtcgactggtaagccctgcagtagtaccagatggtacagatggaattatattattaattgacgtgcatatgccatttgtaatctcgcattccccggaagatcatttggtgattgagatgacgccactcgatatcgaatatacgaaaaacggcattggccaaatttaaccaagcattcattctaatgtagttgattgcatttctttctgggtaggcacagggtagatgtgatatgaaaccaacaatagtgcgctcctatgaagcccatctagtaatcacgtggtttatactcccatgagatgtgttaaaagatattaagtaaacagcataaaccacactctgcagttatagaggacttgtctttctatagatatttatcgctaatcttcctcgaagttatagaaatcgacctagcatggccaccaaggtcctccgcccaacaaagtcaaaagcaacgccgtctttcccctcctcggcagtctttcacccgcatcagatcacagcctcagcttttaataaatccaagcgggggctaataggatcactttatatttaagcaagcatccctagagtcttggtctattttaaaatccctgtgcttcatattatccaaccccatcaccatggcagtcatccaagcaaaatggaccaaagtcgtcgaggctgaggtcttacggcgatcgtcccaggtagtctccgtcattgacggacaggtttacatctttggcggggagttgcggccacgagagccgagagacaataacgttcacattgtttcacttggacgtcgtgagtctccctatttctacaaaaaaatcccaaatctgatgccagcgcatacaactaacagatcccatagccgcaaccctatctaccaagccatccaccgacaaatccccttcgccgcgagtcgggaccgcctcggcaaccctcaatggcaaaatctacctattctccggacgcgggggcgcagcaatggcaccggtagaagaaagtggcgctatttgggaattcaaccccgcctcagacgaatggtcactcctatcaccatccgacgcaaacccgtcctctatcccggcagcgcgcagctaccactgcacagccagcgacggcaaagacaccgtgtttatccacgcgggctgtccggagaagggccgtctatcggatctgtgggcattcagtgtatcccagaagcagtggacggaacttgcttcggcgccggatccaccacgcggtggaacctctattgcatttgcccagggtaggttgtatcggatgaatgggtttgatggggagcgggaacagggtggcagagtagatgtgtatgagcctgaaaccaatatgtggagctcgcactcgtttgtttcagatggtatgactggaccatcgccgcgaagtgtggcagccttgcttcctgttgttgtttctggccgtgtgtacttggtcactctgtttggtgagcaggatcctagttccttgggacatcagggtgccggaaaaatgttgggtgatgtgtggttatttgatgtagagacccagctatggaccaaggttgaggctcagggagatgagcgcccagacccacggggttggttcgatggcgatgtccttggtaatggcagtattgtggttcatgggggacttggagaatcaaataatcgactgggcgacctttggactctcgagtttgtctaatgttttgaagagatttagtttttcaagagaaaatcccgagggtattcaacatcaacaaaaaatgaaatttgtaggagaattatggagttttgaaaagaaaagaacaaagctaagagaaggttatgcgtcatgagcgtacagcgaaagcacaacaagtcaaaaggaaatcgtttgtgcgtgctatgaggtcttgaatcgtacagttgccatatttgcctgcgccattccgcaacaattcataagaaaagataatttgacagagcgaaagaaaagtcaacgagtcgcaccatacaccagcaccatgaggggaagtccggcggaaggaaatgaacaaaaagagtcaatgactgtcatcgcaaatcggaagcaaaaaaaaaggagaattgacatgaaacaggagaaagacctcggaaagacaaataaaaaaagtgtagtagttattgtgacaactgacatcatgcacaggagaagtgaaaaatgttctgcgttagagttctactcgtttttggagtattgcttagaacatgagagagcgggttttctgccgacgtgcttcgacagtacccatctcgggttgagaatgagtgtgcttgtgtcgaggacgtgaggattgaggcgccggcgccccagaccccgcagaagatggaggaggtgccatcatcgcactgttccggctccgaacaggagatggcagtgaggcaggtgctgtgggaatcccagtgggcggacgacgaggcgcagtctcattgctggctttcatgctacgctcacgcttgagcacaagatcagcccagggtttgagtgcaccattgccggagctagagcccttcccaacagcttcagacatgactcgaagccagccctccttatctgcggggctatccgcatagaagtcaatcacttcaccattaccaaaacggatgcggaatccctcttcaacaaacatgtagccatcctcttcttcggcgaatgcagacttgcgacgggtaccgcccttcgtgttggtctccttttgaagtaaagaggatcgatcgtcaatgagcttggaggccttggctagattaatggtagcacgaggttggcgcgttgtttcgtggaaggccgttaacttggatccttgaagcttaaagaagcgacggcgccagtactattgtgatggattagttttaaatcgacgatagaagacttcgtaagcacttacaggacaatctccgccctgttgggaaaggaacccttcccagcagcgagctgcaacactctctgcatcgcgcaattcacgaatacaggcattcatgctcttcggcatgtcttcatccttgctacctttcggcttaggcacgaatagaagttgcacttccaactttccaatcttataaggtggtcgacgctgcgtattaatgctagtcgcactcttcttgctcttgatgctgctcatctgttcctcaacggcccattcgttgaagcaagcaacatcaacaatgtggggacggccaaacgcctgctgctcgtggtcgcttaaagccacataagcgcggccaaagctaccatcacgtgcaaccaagtttcgaagccgttcgtatacgggagcattaacgtccttggccttctgttgctgcgactgcatttgttgcttaatgtcaagctccttgcgccgacgtggggatgcaaatacacggctgagggccgacgccttctggcgtgatggcgatgatgcgggttcttgggtttggaatttgctctcgtcaatcttcatttgcaaggtcaactggaactcaaggtcattctggacgatgagctcgaactcttgtccgattggagctgacttgcccatctccaaccaggaggtggtcacacagtgcagtccgttatccagggtcagtgcaaaatacgatcgttcacctacagttcggttagtgacagtcaattgcagtgggtactatgatagggtcttaccccgtgggagaggaaggtcacaatatttgaggcctatgaccttcacaaataaacgacctcgctcttctccatcttcaaacgattcggagatggttggctcgttctcttcaatggtggctggagcttcctgaacattgctgggctgtccagggagaggtgggactccacctatgccagggacgggctttttcttcgggataccggtggcagacttgatacttgggcgtcgcgctgagccattccaagggactgtggtccaggtctgttggctcgccttgcgtggagaagatccagcggagcgtgtaccgtgcggatcttgggcagtgtgttcggcagaaggcattgcttcttcttcgttacggctgctggcaatgatgactttcgtgttctgtctcatgaggtatcctctctgtttgggggtaggagagtcagcggggtgtgcactaattcctggggtcgcgggatccttgtgtcctattgcctgggaaggcagtaaggaactagggctttgggaaagggcaaggtggaatgcaaccttttgggattcaatgacacgatcaaactccttgtccagtccaaatccaaggctttcttcctggatactgaagggaatgtcgagtttcaaacaactactttgtcgctgggcaagagctgcgggccccagctttggtggcaagtcaatattttcatgttcgggatccgacgagtttgagtcgttggagatctgcttagtcaatgaaggagtgggtagagcgtgttggccactgatctgacggcgggtggcagccatcgactggatatccgcaggggtcagtgagggcctggtcttgaggccagcaccgggagctcggattgttgcgacagggtcaggaacagactcatcggatgagctctcatcatgttccggctctaactcctcttccccctctgcatcttcctcttcctgttcttcttcttcgtcgtcgtcttcctcttcttcgtcctcttcttcattgtcgtgttcgatcggatgacgaatgacagagtctggagtagacgcttcggaagcttggtcctggtgcatctcgggggtaagagggcgtgcgagagactgacggatagatgccatatcgaaggactggttttgaggggcgtttggctctttgtattcctgggcaccctcgtttggctgtgcgggcttttcggcgtcggtgtgggtttcagcattgggggtagtctgtccagattcttgttcatgactatcatgcccagcgtgttcgcgatcggcggcttcggcagcagagcgtagcgagtaattgctggcctcatcgtacttggcccgttggtcacgggatgacaagctgttgtctgacctgctctgataataatccgtaatagagtaaaggtcttcatcgcgctcttcctctttaatgattacacttgaggagtcatcatcgtcggtctccgtggatggaatgggaacatcagggtcataatggtcataacgttgggggctggaagcaatttgagaagaggcatctgagctgtcatcctcataactatcacctttgcggattccccgcaagattgagtcgcgagaaatgcgaggtggagaaaagaagttatccttggcatcatctgcgtaagtatcatctttcgatgcaagcgtttcatctgctctaggaagctccaaggtttcctcgatactctcggcgtggtcatcatgtgtctcatcatcatctctctcttgcagcatcatgagacggagtctctcctctatggacccagcgccggggatatcagactttgtatatgcggcaggagctggaggcgtagggagcacacgctgtcccgcgctgccgatctcaaaagcggcagcgagcttatcagcagaggacggacgcgcgccagacatgcgattgaccgatggcaaaggcgggaggggacgtcgctcgccatttgagtccagcgactcgacgcgtgtgtgctgagaagatcctccttcacgtgaaataggtcgctcatcggcgctgtcttcttcgacgtcttcgatgaaaggatcgctatcactgtttgttgggctcataaaacgccagtcttcgggcaacacaacaggagttttctcagcatcttccagcgaggcgtcaaagctatcatcacgctcaatcgatgactcggcctcaaaactaagatccccctcttcttcggactcgtagctgttctcacgtgactcagatgcaactgaggagagatccggtgtcgtcatttcatattcgttgatttgagggggggcgtgatcaaaagtgacactctttgcatgtcgatgtccagcactgccatattcggaccaaatatcgttctggggatcgaatcccttgccataccgactacctttggatagcgaggacttgcttggcgatgcttggtctttgctcgaggatgacgggcgagacatttggctggtatcttcgtcgacttgggatttcgtaacattcatttggctgttccgttgcggagaccgctgcgagcctaatggtctctggggaaagaccaccgaagccgggtcatattcttgaccaccttcgaagaacttgttgttatttttgaccttcgacacgcgtttcaagttttcgagcgacgggcgctttgaggggaaataacacccctctggatcgtatggcgctttattctcggctccctttgggaacggcgatggggagtcccgacctttccaaaacaggcgaggggaggcattgttattcagagacgagacatcatatgcaggcgattcgccgtgtggcatctgctaggttgttagcatgcttgaccacatgcaaagcatcgcgttgacagtaccttggtaacttgattccagctaggcgaattgcgcctctgggccatggggctcacttcggagagtggccgttgaccaggtcccttagccatattgacgttgggtttgctggtgactcaggatgcgaagtgtgcaatcgtaaaacaagactaagacaggtgtctataatgtgtcagtgtttattcaccaagtcctgatcagcgaatgggttcacgactgatgacgaaggacataaggcaaacttgcccagagatcaggtaccatacgtttttaataaccaggagtcgcgtgggaaatagttgccagcgagtgctgatatattcgctgcaaaggcgtaaaggccgtgtcgatcgtggcaagaatgctgcggcaaagcgaaggtaccaaaacaaacccaagttgggtgtctaggtgtcaaaccaaggccgaaaaaaaggggaagggataacgaagggatacgaatgcaaactcccaaaaagaaaaaaaaatagcagggaagagcgacagagacaaagaaagaggttattcagaagagtagcagaaacaacgaagcttgatatgtctctcccatggattcaagtggattgttaccccaagcaagaaactgttgttgcgggagtcgtcatggcaacggcgcgattgtttcagcatcccgtgacattgcgtcaggtgcctccgatcggcgctagcctacaagtagaatagcctcgcggatcgttttcgatgtcaacatgcacctaccaccttcaactgttaaaagtacctaaatatagcacaagattgaatatgtaggaaaactcgaatttgggtatcggagtttcttatagagtcccactattcaaatgtgaagcacagctagaatttgatgtattgtttcctctttctaacaagtcaccatcgattatatgtcaagacaaccttgtaatatgtgtgaggtttgaatggcagcaaatatcttcaccaatagggtaggcatggagggctttaaaatagggaaggtatatctgtagagctcaatccaaggcaggagttactagagactcccaaggtgcaggcaaagctcacacgcatatatgaacttagacgaaaacaaaagccacgacaggccacttccttgtcaacctctctagcatccaccagactatagtggctttgaggtctgtagtagcatgctgaatccggatatatgaactcacccgagagcaagccgcgggggtgagtccgctcttaatatgtaggaatttggatggatccaggcaactatatattccgtagttatagatatgatttacctacaaataatttctctcagcaatatgacagattaccttgagctattggttttagtttctgagacgaatagtcgcacagatttagcacaacagaaaatatgagaagtgttggattactgagaccaccagtattgcaaacaaacatcaacaaacatgtttatgatgtactgagtcagcattttagtcacctgaccatatgccaaagtttgtgatctgcgctagtctgaaaaaggaatggcgttttatcatcgcggaaaaaaaacatctgaacctgttctggcctttccttttcgatcattcagcgttttccacttccgcgcatcttatcggttttaattaggtagaatgcctctgccagctcgctcttcgatatgttttctatgtcaaactaaggcgaccctgcttgccccgtcgattcttccgacgtcatggcagaccacacgaggcatggccaccgttcgattgcgtcgcaaggctgctcggatggccctgtcgcccactgtttccaaaccatctcttccatctcctaacaagccacgacgggaacgggccggtccctttgcctcgatgaaccagacccaggcacggattcgagacacaccacgcacacgatcacaggcggccctcaagcgttcaggggaggagggcaagatggaaaagaaggagagcccattgtacagagctttgaagatgcagacaacgttgacagctgtgccttatggtcgacgttccgctataaaagctcgacttgccgacatcactagtttcgaccacttccctctccttcccgcagttcgacagtcaatattcggccaggctctggccggtctaactgatgttacccccacacccattcaaagactcgcgattcccgaattgttactagatgaatccaagaagaagaagaaagtgaacaaggcgaatgaagatgaagaagaatacaattttgaccagtatctcctggcagcagagaccggttcgggaaagactctcgcatacttgcttccaattgttgatgctatcaagcgtgctgaagtcctcgatatagaggaggagaaagtcctcgaggaacaaaaggcgcgagagcgggaggagagaatgaagaacaaggcgttcgatctggatcccgaggagccgccaatgacaaacgccgctcgtcctcgggctatcatcctcgttcctacctccgaattggtatctcaagttggatcgcagctcaaagagttggcccatactgtcaagtaccgctctggcgaaatctcatcaactttcactccccgccggatcaagaacaccctattccaccccgccggcatcgatattctagtttcaactcctcaccttttgagctctgttgcgagatcgaatcccaatatcctcagccgagtcactcaccttgtactcgacgaggccgactccttaatggaccgctcgttcatcccgacaacgtccgaaatcattgccaaggttgctccgtcactcaaaaagttgattctctgctccgccaccatcccccgcagtctcgacaaccagctgcgcaagcgcttccctgatctgcaacgcctgacgaccccgaacctacatgccattcctcgtcgcgtacagctaggtgtcgttgacattgagaaggagccataccgcggaaatcgaaaccttgcctgtgctgatgtcatctggtcaatcggcaaggcaggagatagacacgaacataccgagacatggggaccgctcaatgcgtacatggagccgaaggttaagaagattatcgtgttcgtcaacgaacgtgaggaagccgatgaggtcgctagtttcctgcaatccaagggcatcgatgctgtctcgctatctcgcgacaccgattcccggaagcaacaagagaccctctcgcagttcacagaggttaagcttccaccgactgcggaggagatcatgattaataagaagaagaaccgcgccgccggaagcattcccttcgaacttcctgagcgccaagagcccattcgccgccttcccgacacaaaggttcttgtcactaccgatatcgcctcccgtggtattgataccctggcagtgaagacagtaattctctaccatgtgccgcacactaccatcgactttatccaccgactaggccgtctcggtcgtatgggcaagcgtggtcgtggtgttgtcctggtgggcaagaaggaccgtaaggacgttgtccgtgaggttcgcgagggcatgttccgtggccaggctttgatctagatccagatccagactcacgcgtgcgtgcatttatcacattgtataaatcttgtaacatacatggcgttgatttgaggttttgattttttggggaattggaaaacgactatacccattgtcgcgatagtcattggatctttgaaagtatgtacgatatgcaatcatatatgatgaacctaattctcctcttatataacgacgtctgagtccaattgcattgaaacaactgtaaacgaatattttcattataacctcacacgggtatttcccgcgccacccttcgccagaagtcacatctcttcttcaactggatcagcttcacgttctcaagcctatcacccacaacgacgaattcctcgtctgtatgtagttctggcacacctggctgcgaagcgttcgtcaccttgtgtgcattcgggtctcccgtctggaaaaaactcgcgaaagcccccgcgtagccttcataaacgacagggttagtctcttgaacagtgttgattttgttccactggtatcaatcaagtcaatctatgccatcgacactaggaaagcctccagaaaaagagagcgcaacgataaaaaggacgaacatacataaatagtatcactcccatgggttgctggggaaatcgtatattccccaagataccctttctccgtcgcagccgacgcaatccaataagctggacaagcaagcacaacgtcccgataaaccaaaccagcccgaatataagtattattataactgtcaatcgtctcggtactcccttcagcgggataatatatagatttcacctcatcaatctgcttagccgacaacccaggcacgaaactggaaatccaccggtgaaagctgctgacagaggaatcaaacccatcgaataaaacggcgctgtcaagacccggaggaacgaagttctcaccctcgtggctgttgtacattccccagacaaactctgtgttcagggagcccatgctcacagtttctgtgagagtctcgacaaggaaggtcccgtctataacaggcgcccaggtgtaagaactcgttgtccaagtgttgctcgctccgatgatcaggcttgcgtcacggattttctggatgtcaacagatttgagacaggcgaatatctcatcagcgtggttgtagctggcacagcctgttagattcgccagctgggtgtagattgcttctgcctcgggtgcattgtatttataggtctttggccagaacggcgagctagcaagggcttttgagaatagtttcggttggccatggcggccgtttgcgaggacttgcgccactaccgagccggcaccggctgactggccccatattgtcacgttgtgagggttgccgccgaaatggccgatgtacctccggacccatttcaagacatattgctggtctaataggcccgggtttagatctgaggtcgacgagtctttgattgccttgccgggtagaaacccgaaggcattgacgcgatagttggagtagataacgatgtagtcgttaatattgctgacattgaggatcgggtatgaggatggtggcatggtgaatgccgcgctgccttgaatgaaagcaccgccgtaaaatacaaccagcactggtctgctaatatccttggctagatcccatggccgtgagaatagtcccaggtagagacagtcttcggtgccgttgaccgtccgctgggggcacatgtcgaagtcctggtctgtatcatataggtctccggtgatctttagcggtggctgaggcgcacgaaagcggttctcccctgttggtggtgcagcaaatgggattttgcgaaaataggagaggttgtaggtactgtcatattgacccttgaaggatccgtagtcgagggaaactagagggttgtcccatgcagtgctgactgtgaccataaggccgaggagaagcgtgataacctcattggagaacctcatcttcggttagagcggttttcgttctagagttattgttctattcatctgccatctactgcgtttagcctgggggccatatatagccttcccgagccatcgcatttgataagaggaatcactttcggcagaggaaaccccgagcttctttgtggctctcgagcaattcggtcgacactctcgggcttggctgcgagagagcagctcattggtgcagttattgttgatgcccggaatgaaatgtggggatttgtgcagtcgttgtcaattcggactcgatcaccccggtagtgagaagaaaaccgtagttagctaacaaatcccgaggacacctaactagttatatttatattcaacaccaggtccacaattagtgtgtcaaaacgcagctgtcaagggagtccccggggaataaagcccaagtaaacattgccccctccagaatccaaccctgaaaatgcatcattgcaagaaatcaaaactccagatccaatttccatgcaatataatgccaattaaaccaagtattatcacaaatgcccattcttctaaaccaaaactccgtcctcgcccgtcttgcctcgtaaattgcacaggggctccaaggctgtacagttaaaacgccatacgaagttctctagtacgacgccgacttgcccgagcatcgcggtgagactcagttgaatcactgatttccctttctggggtgtttgtgtcagacagctcgggggtgggggtaatcccaaaactcacgccgcggtctcggcgacagatacgtgattgtgcgtcgggggacaaaaaacgatggacagtgcggtgatccattactcgatcctcaccatccgggcttttgtccgttgatggccactggtatccgtagagcttggaatgacgttcgcagcgcggacattcacgtcgcgtgaggtatgagtttgactggaggaaccatgtatcacaggtctggcactccacccagcggtcgtacttctgggcaagcaatcgtgatgtcttggtatagtctccagggactcgagcaacctgtgactcggtctcgacggagtccatgatgaatcgccgcttggtgcgaggctttcgctttttaggcttattcacaatggtgccgtgggcgtcatctaatttggtggaatttgataagtctgacaatccttcttcggggtcaatgtccatggagtgggtggtgacgggctgaccttcaggagagacatcgggatgatcctcactgttgagcgctttcgactcagacggttctaatatagtttcttctgtcttgatcttggttcctatgtcgtcctcagttgtagctgacgtcgacgagcggtgaggttgatcggctgtggagtttggagattcgcagtctgtggggatagtagaattagtgctattcgtcccgtttcgatcggcttgggcagccacgcttggttcccctgtgacaaccgaaatgaagggttgtgaattagttggcgatgtcattgcggttcgctctatgatctctttcttcggctcggacacctgggctacagcttccgtcagaagagtagctggaatcagtacagtgtccgggatagggatgtcatctgatccgggcgttggttccgcagtaagttcggaaactgagatcccttctcgcaacttagaaacttgtcgttggaattttgcacgtttgcgcggggtggaagaagccaaggtagaggagctgtcggattcctccacatccgagctgcgtccacgcttcctgctcgcattgctgtcttcactcggtgtatcttcagacacggggctggcctctttgctgtttgtctccgtatcaacatgtgaagaccagccattccgtacagcgatttcgcaagtatgacataggcactcgcagttgtcaacgccaaagtaatcctctccgtaggaaactgtgatctcttccccctcgtggatgtcgcgcatggctacgacagacatgccctcattgcccctggttgtcaagctgccgttggcatcacaatcatgattggcaaaacgagcaggacccaaaaagaacgacggagctttacggcgactcgacatcacgatgctgaagtctttgcgggtcaagccgagatccaactcttcttcatgggtcatagacacaagcgttccgctcaggtgtttgatctcctcgccctttttaataaacctgcgagcgcagatcgctgcttcatgttgcgtgataatgtatcgattggtcgtagtgacctcgaacggacagtctggaagatacatctgaatatacttgcggaggtgtcggcggaaccactccttctctcgagggctacggaggtttgccacatatttctttaagcccgagatttccaacaacttgcgttcagccgtcgggatgtccttgtcaacaatgacattgtggagaagaatgcgcccaatatcgtcatcgtggattccgcgggcagggctgtatttcgtgcggttcttgcgggtagtggtccagaaataagcctgccagtagcaagtattagtggacagatatctatgttgaattgtaggcaaataacatacgtgatccactagcgcatccgttgcgacatcgtcatagctggccagcttagccaaggtcaagcgctcgcgacgttcagcggcgggcgagccccttcgcgctctctttggaggcatcatggacgtaagaagaagccgaagaccgctaattatgaaagcgggagagaagaggtcggctcatagaatgcagagcggctgcaaaggtaattgggggaacagtggagggcagaggtccgagggatggggtcgaaaaaaggttcgaagcgcaagaaagtaattaaaatgagtgactgacaatcaacaaaacgaacattatcaagtgattgtcaccattgaggctgttccaaggagaaaggactccctcgcggatgttttttaggggtggaacgggagtgccagctgagacttgccgttctctcgacttttactcttccgccttcccccttgacgtgtcgctttttttttttctctgcggtaattggatatgaagtaattgatcaatggagtatttcagtacgggggttgtttcgacttgattttacgcgctcagctcgcatacaacaggatgatccaatccttgcccctgcggtatcatcacaattgcacccaaaataatcttccagatcaagtgatcattgtttttcagtcttgttcatagaatgtattgtatattatccttcgatgggtattgactgtataataccagccaatctgctgaagaattcaatggatccaactatgaacatgggatgctctctttcgtgggctttttaaggaataacccgatggcttctcgagcttaggtttttctctgtgtccctcggagtatataaaagtcaaccttcaaagaagacaaaacaaggactataaagatctgaatgcgggatgttgctgaactataaaagtagttggttgatgtcgtatggattgaattaagaaaatcccacgtagggtgttgcttgaagtcagaatagatactccatatgattactatactaaacagctcagggtacttatgttatgaacaagcggcgcttcttgtgcttgcttacgacattaggacatacccatggctgatatatattggagaatcaaacgacagccttttatgagcacaagctcaaattagtctgatatttgcaaaaaatgaatagttgcgcgattccattctaattccattcccaggaaatccaactcgaagtcctaataaccaactactccgtagtatattgtataaaagcccggataaacctactccccggcgaaacctccctccggcccgcgagaacaaattgcggacaagcacttatctccagaccgagtaccaaaacacaatgattcaattaaaggtacgcatgcgatgctccttagtggctcaaacgatactaacaccagctccgccagacactattaagttgcatcgacaattccggcgcctcgatcgtcgagtgcgtgaacgtcctgaagaagaagcggcccgcgacaatcggtcagtctccatggcactcagatctagcaacacagcaagaagggatctgggaattaaagctgacattgtgattggttatctaggtgaccggatagtcgtcgtcgttcagaagcagcgatctgcaggctccgaagccaccaccgctgccgcgctcgccaataaggtccgccgaggtgatattcgtcatgccgttgttgttcgcgtgaagaaggaattgcagcggcctgatgggtcccttgtccggtttggtgataatgcttgtgtactggtcaacaagtccggagatcccattgggacgagactgaacggtaagtgcccatcggggagtctcaagataacggctgtctccaggttttcgatactgatatctctacaggtgtggtgggacaagagctacggaagaagcagtggtccaagatcttgtcattggcgccgatccatgtttagtattttcaagtttctacatttgttggaaagcgctctttgtttctttgattgtacttcaatctgtatgtattcctagttgatggcatcagtttcaccccctgttcctaaatatccacgaattttcatcctgttcctgctccaaaatgttcgccgaactcctatgatatcgccaaaaaaaaaacgacaaaaacaaaatctcaagggtatctcggaaatggagactgcattacagaaatgcaaagatcacatgtagacttgtccgcacgcacaacatacgtagtagagtttctgagtagatagaagcaggagtcagcgcatggtttatatcagagggtcagggatccatcaaaggataacttctcaccattcccgtttcggcggatcgttgttgtgactggaaaaagacggcttcggtttcgccacagcttgggcagagcttgttggcccgtggaagctgcaaatcccagggtgttagcgtatggatgctcaaaaaaaggtacagagctggggtagatgcccgaggcttgatttcagagggctccaggctgtcacccacaggcggtgcatcctcaaggagatcctcgtccggggcggaaccgcagatcgaacaagcataatatcaccgcatagggtaaaaaaaccaggaggacgaaccgtggggtcagatgtcacgtcctgggtgacaccggcagtgtcaccgacttggctatggagatggttttggtagacacagtgcgaggaggcaggctcgccgacatggcaggtacggcacgtgaacatcaatcggttgttgacgcgatcttccttggggtagagcaggttggagctgttgaaaagtcagtaagatgtcctcgaatgtgtaaaggttcccatagaaatgactttgagttgaggacttgtggataggcttaccattcacggcagaacttgaaatggattcgatccgacggcttagtctcgccaccagccgtggaagaagggctggcagacatgctgcgcaggtggatcgcaaaatgctagacgtgctgtattgagggtcgagacgcagagtggtcttagatgtgggaatgaggaaaggaagaaatgaaatcacgtggaaatcacgtgttttgtggatggtgaggtgtgaattcgcctgccccgtagttaactaactactccgtaactaatacagagtactccgtagctaattccgtgtatatgactcacctcaacctagcgcattgtcggccttccaaggttggaataaaagagtcaacaatgaacctaccaattacatcgctttgtctattaacaggcccaggcatgacaggattgatatcgaattacgtataaataagcaatatactgacgtacaggtattaggacctacattgtagctcgtctttattattgcgagctcccctataactacgtaatgtattattgatgtagatagttgtcatagatggtgatcggtcaaactgggaagcgggagagctaaagcttggacatgtttgtgtggtttgcaactgttcaccccgcagtttccgttcacttataactgactatatcgttttatcgtttacactaaatccgttggagtgttattgatctgtacattattatttactcagaaaattatcagaatcttttagatccgattgcaaaatggtaggatcagttcatccctttgaaagtttgcatagctgactcttcgacctaggccgacacaggtcttcctaccggttgggaagttcgccattccaactctaagaatctcccatactacttcaacccttccacaaaagagtctcgctgggaaccacctgcggaaactgataccgataagctgaaagtctatatggcgcaaaaccacaccccggctgctcgctctgatccctctggcgagggtgagggcaagatccgctgcagccatttgctcgtcaagcatcgcgatagccgccgtcccagcagctggagggaggctgatattactcgcacaaaggaggaggcgattgaaattcttaagggtcacgagcagcgcattcagtctggagaaatcactcttggtgacctggcagtcgctgagtccgactgcagcagtgcccggaagaagggtgatttgtgagtttcttaattgacctatgtgcaggtgtcttgctaactccttaaaggggtttctttggccgcggcgagatgcagaaggagtttgaagatgccgcttttggcctacagcctggcgaagtcagcagcatcattgagacagcatccggggttcaccttattgaacggtaggttcacccacgggagtgaagtgaaaatggctaataaaggttctcggtctccagtgtccaataatcgcatgctcccgcctatgtcttggtcaattccatagcgaaaattccgatcgcatcaatgcgttgcaaaccctggtctcacttggaataatcttcataagaaataaaagtacaatgaatgaaatgccatctttgttctcttctgacttatgagtgtcttgtgtcctgtctcgggtaggaccaatcaagtagcagaacccgcgacagccttttattccagaaagatgccaatgtatcgttttgaagatgatgtctccaaatgcccagaatttgtgaaagaagatctgtatcacaacagggctatgaagtttgtcgtttctttggatccaagaaacagagtgaaactcgaaaatgtgcctgatatcatacctaatccctaagtctaaagtagactctgccttaggctaacaatggcacttttaggcttagtagctatgatcaacggaaggttccatggttggaaagggaagttgagaattaaaataagctgtataccgtcgatgtcagaataagatgtcaaaggtcattgagcgcaagcaaaacactgctcttacagacgagacatctcccagtttcatctacttttcttccaccatatttcctgtcactctttccttcttccttctcacccacaatctctctttaccacttccccccaacaatcttttctcatacagccaccaactatgagcaaccccactctcaaactccgccagaagcggtccatgatgcgccttcttaatgaaggccgctcgattctcgagtataagttcgacccaagcgccttcgtcgtcccccggtggattttagtgccccacgaggtgcgcaatgccatggtcgccctccagtacaaagctatggtagccgtatatggcatgaagagcctcatggtcacccgcgaccaccgctacttcaagttatgccccaaaagcacaggccccattatctaccagctccatcaatcctccatgcatcgtctcctggaatggaaggaggattggagtttcgccaacccgacccttgcagccgctgccaaaatccctcgtgatgtcctgcagttctgcgttgactcaatcgcctacggaaagtttacctgtgattacaccaacaagattgacggttttatgtctggtgctttccagagttggcgccagcttcgcatagagattgagcatctggccttccgtctcatgagccataaaccgcacgagtacaataagtggcttgtctggtgggagggcaagtttgctgatgacatgtggagatgggaggtttgcctcgagggcttgattctgcccacctgggaggagatcatcgatgatgtctacctcatgatcaacgatcgagttgaggatgcccaggatctggccaacacattctacgtcagcaccccgggactcgcttcgaccgggctctgatcacctgggctttgactttctgcaatgatgattaatgaatatctcaacaattacgacaaatattggtctgggtcggcgctagtatggagcggcctgctgtgaatgagggcactagaaataaccgggagttttgatttgattttttttccttcttgaaatacaacaaactacagaaaatgtatcctacgatggattgtgacaactaagggcaaatgcaccatggtggacttggctctgcaacacacttctttcctgactttctgttacttgagattattacaagaagctactcaaataataagcacccaattatctgatataattgctcaatgaaagaaagtaaaacatttgatttgcctgtcaatggtcacgtgtgcgttcgaaccctatcaatagtagcagccctatgggggaacaaagtaagtaggtgccttgttattgttcgttttctgcaaaagcaataagacaaataaactagacaagggaaggccaaccaaaaagaagataaacccggagtcgaaccggaacagtccaggtagtggatcttcggcacttccctcgaagtgcacatgcaaatcatgttaccagtaactgttgagtcctcagtctgagctttatattccctttctctctcaattttcaaagtttatttgtgtacacacagcactggctaaagaaacccttggaaggaaaggacagagagagcgaccaagtccaagcccacagaaacacatggtctttgtgcaatttgtgatggtactgattcttttctttcttgtgaagagtacctcgatgaaggaattcccgacaaggaagatttcagttccggaaacgaagaaggatgatctattgtgggcctctcctttaggtctaaacgcctgaccaaaagctcggaggaccgatcattgctgttttatggcttagtgcaggagaggagcactacccaacaggacaatacgagatatatgaggggcggaccggaagatattgtcaaacatgttattatgttatagactgggccagtttctaagaagtattttgttctagtgaaattcacttattatttaggggtcattccagcgaacagcgtcacattattgcgtagatgggaacaggatgaagtggtgttgacccatgaaaaagagcagccgcctgaggatatctaaatcaaccaggaggaatggagatataggccacaattgagatgttgtaacctttaacggcttagatctagctgaggacaacctgaggttcagggtttaaaattcgaacagtggctcgtctcacgagccttgtgaattaatgcgtaataacatactccgtcaatgtgaaaaactacatcccccgacaacatgcagagtagacagctcacagactcgtgttcaatcgttccaaacgtgaggtaatcgcgtcaataacagcggatcttgaagaacgttagtcattgattcattaataggagaataagagaggcaactcactctcgttcgaccatcctcatcgcatctgcaaccttagcccgttgcagtcgttggggcaccttaggcgggcccccaggagaggacggggttccaagttccggagagggcaatttgcccgcgacagacttggtctgggccataagatccagagcaagtcgtttaacctagatgaaatgtgagttttgctatggcgaatgcaagaaagataaaacttacagtctccaaccgcgagatcaatggctgatcctcctcttgctcttcgccttgctgtaaggatgcagacaatgtcttcacctcaattatccatgccttctccctctcactcagaggacgacctccagaatttaggaccttcgtgcgtagtgcctcatatcgtcggttcagttcactttgcttgttctgggcggcttgcaatcttttatccagcgcttctccatttcgtactccctccttgcgatgcccatcttccccaatctcactcgtgacacccttgacacgctctgcaacgtctgcaagctgcttcaattggtcctgcatctcgccctgcagccgctcacagcggcggaataaatccgaagcagctcgctcaagagcattggtatgagcagatagcacgcgatgcgcagtggccacaagatccaatgtcgcaggagacaggcgaacttgctccttgagcgtatggcgttgccgatgcgggacatgcttctcgacgaaagaatccagcggagagttggcatagaaaatggcgggaacctgatacggggcccggctcggcgacaaaagaagcgagcctggcgctgaggctctgggctcatacagtgatttgtctagtgccaaggagagagaatcttctggtgtatccattacaactgcataagggttagatggatggtaggtgaggagcaagtagccaatgtcaaagtcatagaaaacaagagacgtggcaagatgttcgttttgcgcggtaatatcggcattcgaaacctgcaaaattctctctcggttggtcacattcccgtcacatagaacctggagacggaaagcggaacctgcagtgtcttcagcttgcaactcagcccccagtctctgtacccaaccggagagagatataaacaccacgttggtggcagtggtgacaaagaatgagtatcgagaatggatatccttggtgaaagtaggccatgaggttgtttcctccccatccttgatcgtatctagtgattcgaccaggaccaattcagtcggctctgaaacaggagtttggaacgcgttctttctagctttaggtagccattgtccttcaacgccatcgagctctagacagatgtgaactcggccattcccactagtaagagagagaactgttgccgaaagcttatcttggtccccagtttccacggctaattcttcttcctcgcccatcatgagatcctcgacgtttagactggcggcaataacaagaagatcacaaagatccaaatcatcgagctcatcgccagtttcgaagcggaaaggcccttgtaatcttggaatagcgctaggattggccgggcgcgtgaacacatctgcgccttgaattgttcgtgatccagaaggcgcatccagaggttcttgttcatcaagctcagaaagccagtcatactgttgccggcaggcaatcagttcctcctccgattcctgggattcctgttctaaagcaccgagtttcggaataatcgctgcagagagggaagggatggtcgtagaaggggcttgccacttaaaaggcaacagaggacaaagcgcatagagatcaccgggtctcatggctacccacagggtcataggcgcccacgcatcttctttctcattcccattgccagcgaaacaggccgacgcaacctccatatcaataacatcagcggagaatcccttgcttttgccaaatccagaaggcgcgaagtcctggtcgcacgaggtcccatcgacaagtttcttcagatcgattgctagagtcggctggtcgaaggaccagtggttattccggtccaactcccagacacgtactgcagcgtcagccgtgacagtaacaatgcagcctcctaaattggtgtgcaaccccagtggatgccatagcgcagagaccaccggagcctcaggaataacatgggttgtcggtcctaactgatatgtcttcagccggatagagtcggagtcggaggacgaaaggtgtgaagaatcgggaagaacggagatatgaacggtgtgttcagtgactatggcaaggaaggcgccattcggagaggggatgatctgtttgatctgtccatacacgggcactgctaagacctgcggaactgttagtcgcattcaatttaagtcggattttgggtggaatagctttgcataccctgtagggaggaacctggctgaggtcaatttgctcttcagcttgactagcatatccctttttctgcttaatctcttgttgccattggtctttgagtcgggcaaggtttgaccaccgtatttcattgtcaacaacagcgaacacctcattgcctctcttggcgatcgttcgtgtagctccatttctcatgggcttggatccagtttgcaggtcctcccctgggctctgggctgaactgctagacaggaactttgcgccaggtgagggccggcacagccaggcaggcgcataactgttgaccttcggcattaaggacgattcgtgaaataaattgtataatcggagggtgttgacagtttcagatcatcctggggcggtcggaaatagcagacgagtagcgtatgtgggaaaaaaaacaaagttgacgaaagcaaagttgttgatgcggagtggaattcttgggtgccaagatctttcgaagagctccgagctgctttgcttccccaactacctgccgtcaaccacacactccaagttcaacctttatctcaattcactatgagtttgctggctgtaaacacggtcgaccgactggatcgaccaagcgcctactacgtcagcaaggtgagtactcgccctggactgactgccctttaccaagctgtgtcgaaaccagtccaaataggctatagaggctgaacaaactgtccacagaacaagcgacgcagatacaatgatcgtgaggaggaggaaccgcagcaacaggagaaacccgatgacaaattgaaaaatgcgacaaccctctacgtgggaaatctgtatgcaagcatgcaataacttagacgcaattgtcttactaaccaacccaagttcgttttataccaccgaggaacagattcatgaactcttcgccaagtgagaatgcgctttcgagtctcttcgaattatgattaacctcgaattctaggtgcggcgagatcaagcgacttgtaatgggcctcgaccgattcaacaaaacaccctgcggcttttgctttgtcgagtattatacccatcaggatgcgctagattgcttgaagtacatcggaggaaccaagctggacgagcggatcattcggacagaccttgaccctggatttgaagaaggacggcaatttgggtatgtggtcttcaccaatggcggctttaagctcgtacttactgactttcgctgcagacgaggcaaatcgggcggtcaagtgcgcgatgaataccgcgaagaatacgatccgggccgtggtggatatggccgcgcctatgatgagcagcgccagcgcgaggaggacgaatacggtgctggaagataggtcgggacataatggaaaaggactggcttggcaaagcaatggcgttacttcatggaagggtgaatccaattagcagaaagaggaaatgtctattcaccgaataccctatttacaactgtcttttttccaccttctaatgctggtgaattattgctttaacttgtctcgtttcagcactgctgcttgaacttcgcgcaaccaccaagtgtggattcttgcgtcacctgtcagctccgggtgaaagctggtgccgaatacattgccctgtcgcactgcaacaatgtcgccacttccccggtctgaattgatatctccaccccccgtggcgggttgagctgccggtctcactaatgttgctagtacctcaacgtgctctgctgttgctgcttgcgccactgagtcccgtgcttctctggacggtgccacgacaacatcttcctgttgaatctcttctttttggatgccctcatgatggggaagaatcttttcgacgataggggctcgaatgaatactgctgggaagggaggcgcgtcctgacccaagaatggcagatccaacaggccttggaagctttctgtctgtcgaccgaagtggtttcggttcactcgcacatcaagaccaccgatcagctcttgccctcctttttttgtcttgttggcagactcggcgagcaaaatgagcccggcgcatgtaccccaagttggtttgcgatccactctacacatacccaacgtattagattgaattcatatgaactaatcaaattcacttactttacaaattcccgcaatggctcgaggagatttgaccttgctgcgaccaaagacatggtggtactctcgcctccgggcaagaccaggccatcgcatgttgccagttcttgtggcgttcgtacttcgatgaagtgccattccgacggcgtcacttgctcagcggcttttttcaaaagctgcacatgctcaaaaaaagcgccctgcagggccagaactccaacagtgatagccattgtctcgaaagataagaatcgaagacctcgaattcttgatattgatgactcgtttggagcacgtgcctttaacttcccggcggggagcttatctccacgtgatatctctgtggcgcatgtcgggatactctcggactttactccaaagtttttggctgggaagttgactggataaccccagtcatgatagtatagaaatcaaatttacctacagaaagactgatcaggtagccctacctggtatatcacactagttccaatgatttttttcctctcttaggtacgccgttgtattatcggcacgtgttgatagataagaactctgataaggcgcttctatttaggtgggatgctgcatcctaggctggtacgagtatacgagaccccatgataacaatgcaatggtagacctcggtgtatctggacgtgtaagtagctactggcccttcaggaattacccactgataaagtgcagaccaaagcggattccaatgagattaaacagaacgacatcttaaagggccagcccacgttggtccgatggtacatcgatgtcagacgttgggatgaaaaatcctttgaccttccttttctccaaactctgaatgagtctgatcaggtagctgtcaagaagtactaccaaacttcggacaaacgcctgtccttggcctcccagctactgaaatattactatgttcaccaagccactggcactccctggagcaaggttacgattcagcgtactcctattcccgaaaatcgtccattctacgactcaagtcttgatttcaacgtcagccaccaggctggtctcactttgttcgcaggcacgcgtgccgcaacagctcactccttaaccggcgaaccacaaggcttgcctcgcgtgggaattgacattgcctgtgttgacgaaccctctcgccgtcgtgctaatcgtccaccgaagactcttgccgacctggcaactttcgtggatgtcttcagtgatgttctctcaccccgtgagcttgcgaccatcaagaacccgtacgcgactcttaaattggctcgtgagcttggtctgagtaaaattgacccgagaaaagacaacgaggaagttcatgctgcctacggcattcggctgttctactcaatttgggctctcaaggaggcttacttgaaaatgaccggggacggccttctggcctcttggataaaggatctggaattcacaaatgtcattcccccagaacccgtacagaaacttggatttccaggtcgccctctcactcctacaactctcaatgcgccctcagtcgaaaattggggccggccttactccgatgtcaaaatatccttacgtggcattcctgaccattctgtgcgagttcagctcgtcggcttcgagtccgactacatcgtcgctatagccgcttcaggccccaatattggagccatttcgcagcagatggccgtgaatggcagcgatcatcacctacctgggtatatcacagccctcgaccctaaaattgaacatcagaacgtccgaattccccccaatgcgcttcgcacagtcggcgaccgggacccctggtgcgttggctcggcgattgtagacccctggttgcccatgcaggaggttgatattgacattgatattcggccctgtgccgagggccgctgcgagcatctacggaacccaccgagcttctaagtcccttcttcctgggatatgaaccagtaatcatccctgagttacctgcatgttgcatctcctcatctcatactcctttctgagcgagatttcgcgatgattccccttgagcatatttctgcattgctttgttgtgattagcgaaaatcaaatattcctcccatctttagggacttttgtttcaagtgtaatctgttcttagctagtcgagtgccgcttagatgtttatccctaataagcctctgtgaattttcactctccgatgtgatttagatcgaacccaaagtcaatattcgaagacgaagtatatgttgcacgaaaaaagacgagtaagaagcccaagcctatctatgttctgtggtctaatgtaaaatcaaatatataagtaacaaaagcgagtatctaacagtagccgggtcgtgtcatgcgtttacgctaaggatatatacattttgaattgaaaaggggggagaggcgaatcaagagagaagatgatgttagaaggcaatgccgatatctagatcattgttgttctcatgagcagtgtcgggtagtgtcggataggttccacgtctgaggccctcaaattctgtttgttgggtcgaactggagtaggtaccgaagaattgggcaggattatactgtagtgtatgaagggcggatttcttcttcgttaattgtggactctgcgtttgctctctgctgttgtgaactttgaattttgcactcaaaccaggagagacagatggcaaatgccgagcacggagctatgtgacgaatcacaattttgtttgccacttagatttcaatggcgctggagacgccgttggtgcgagaaacatcgacttcgttcttctgtacatgagacatttcttcaagagttttgagcattgaatcccgcgtcgactgggtcaagctatcgacatcgctcgatgtcaaatcctgagtcaaaatgggaggtaaaactgttccaaaattgttagccatgttctatatgacatatattggcaacttttaataacacccacccttaattttgatagtcccagcgttgaatcgccaggcacgaggcgacagaacgtgcgaatagttctctgtcacaatcggcacaattggcgcaccggccttgacagcgaggtggaaagcacctttcttaaaaggtaggagagtaggctcgtcggagtaactccgggtgccctcagcgaaaatgaaaacgctctggcggtgattgcgcatctcggcggcggcaccatcgaaagccttgagggctgtctcccggttggcacggtcaatgaacacagtccgggacagagacatgaaccagcccaggaaaggaatattccgcagtgacttcttggcagtcacactgcagtatggcgggaagacactgccaagcatcaacacgtcaagctcagtctggtggttaccaatgaaaacggccggacgtgtggagaggtattcttcgccttcgacaacctcgaacttaacgccagttgtgaaccgcatcagccacttaaagctacggcctgctgcccactgcgaaacacggccgtatccaactagccgcagacagatcgagacgagcacaccgtacgcggcactgacgaggagacagccatacgaggcgagacaccgggcgacaaaagcggcgcgaggcactttttgaccgagtgcaaagagggagacggtcactaccacgaaagaggtaacacctgaaacaatataagatccgaaagacatgttgacggttgttgggcgatcaagaagagctaggtaaatgcggttagagggtgaaaattatacttcatgagaggggacgtaccttgttcactagtatatggacaacagccagcccacgacttgaatacgaggatggaatcagcgaagaaaagaggaataacagatcaaatccaagattgagccatgcatggcttgtggagaagggcaaatggtagagagttgaatcgtttttctgccccgatgccgactcaccgcctggtatgtgtatatgacggtgtcaccagggcacttgcgggggtatttacaccagaatcaaagtatattttaaggattcagccaataatgagaatctctatcctcaaaaaataatagaattatgcattcaccatcctcatgatgcatgcccagggaaaaccgtgaaactaatgtacagaacaccatcatatgccagatgtctaaacctggaaaagaaaactccacagtgatgccgtgcaaagaggccctcaaacgccgagttcataagagagggcccccgtgggaacccaatagaaagacctgagacattacgtctacgctatgtcctcatcctccatatcgtcgtcgtctaacgactccattgcatccttgatgtattgtgcagcctgtgtgagatcataatcagaaagaacttaaaaaagagaggggaatctaaaaaaaaatactctaagacgtacctttgggtccaagttcaaggctgccgtgaaatgcttgatagcattggccttgtcgtggagcattttgtacagctttccaagaaggtagtgcacgtttgcctcgtccggcgccatgtccttgaggacctttaattctgccaaagcaaacttgtactcgcgcagcttcataagtacgcgcgccttgcggaacttggctaataccgagttgggggctagcgaggaggctcgtccgtagtggaccagggcatcttggggattgttcattttctccagtaccagaccaatgcagcaaatgagcaccgcgtttgtcgggttgatgctggctgcattgcggaagtgctgctcagcgaagtcaagcttgcccatcttgtcatacaccgttcccagtccgtaccaagcattgtaatgtcgattgtccgcgttgatgccgtggcgataggcctccaatgccttgtcgtattcttcgttggcgacatattcatgtccctgtagcgtgaaagcatatgcaaattcaggatcgagcatagtcgcacgcttgaagcacttgagtgcttgatcatgatcccgttggtgagaaaaagagttgccaatagcacaccacgcctgaggggataggcgatcagcttcgagtagctgatgcgccaagtaagccagttctacatcacttttcagatgccataagacggtcgagtagatctccatatcctcgatgcgggagggcgctaatttttgaaccctagaaaagtacttcgcggcttctgtgtagcttgcttgttcgaaataggtccgtccaagttgagacaaaacccaaggtgtttcgcgctggccttgcgagagagaattgaaagagctgatggcatccgcgcacctgtaacggctcaatgagaaatatccagacgcaagtttattgaaaagacccaaaagccaatccaaggcttcaagctctttagttttttcggcatttttgggtaatggggggacgagatgatgcgattgagacaagccagtccgattatctttaccatcattgtcgggtgtctcaatgggttttcgattgccactcacgacacggccgacagtgggcacacctcctactcgtccttttgtagggcctcctctcaacttcttcatctcgcgaccgtctctgccagtaagcgtgctgtttgaaagcttgctgctcgtaggtttgatctggttgaagaggcgaacgcttcggcgctggggagcacctggttcactcggttgtgatgagggaagtggatgggccacttgcccagagactgtgcgcttgcggtccccgaatctcgatacaagagaggaatctcgttctaccggagcagctggctgagtctctggttcggtccgcgtcttgtggcgaggtctgattcccgttggacgcattcgcggcggaggttgcccggtatggtcaaggctcatagtttggattgtccgtgtctttcgggcaggggccaagggtgcttcccatccagcttctgggtctgtgacgccattcgcaatgcggaagtcatcagagccactgctctgtgcgcctggggtctccattccgtcgtggaaaaccggctgtgccatagcagcaaaattaacagagctcccatttaacttttcccaaagagcagagcttccaaatgtggtgtcagtttcgccacgggaggcagagaccataaaagggtcggattcagggttatttggaggctgcattgggaaattcccttcttcgtaagccacgtggtcctgcacagtagttatttcctccggcgatgaagatattattgcaagaagttctgggctaagttgaaagatattcgggacacgaatattgacacctgatattgcattagaaaaaatcgccttgagagaagaagttaaatcaatacctgtttcgcaaagccctaggaaagcatcccacatgaaggggttcagtttcagtgcctccacgtaacagtcaactgcttttgtcaaatctttatgtgcgtgccaaagtttcccttgcaaagaatacacagctgcagcatcaggcaggtgctgtcgctgagtctcactatgcttgtctacaatgtggttagcaagtgagcttggaattgaaggaaaagtttgctggcacttactccagtggttcttagtgacccagaggggtttgctacgctccagagccgtaacaccatccaagtatttccccaagtctaagcaggtctgagcaaagacatatgcacaaccagcatgcagaccacgtgagcccgaaggctggctgcattcgaacgccgccttcacttctccattgtgtaggtggcaaagggcgagcagatattgggcctcaaatgatcgtggttcatatgcgaggaggcgtgaagcgaggaagagcgcattgcggattaggttattgtcgagctggtaatagatgaggtgccttagctggctggcaacatgcccggtggacaaggccatagtgaggggtcagcaacacggtatgcgatagcacaaggcaaggcggaaattctttagtgattattggaagtggagataataatgcgatgcgcagagtcagttccttagcgttactgtagcatcaatgtccgacgcctttgtaatgtcctccaagacgcggggaggaaacaaagacgcgatcgagtgggttgttgcagcacgagcgaatggtcccatcaacagccacgagacatggacagcagcaagtccgatgtcttggtttgaattcgtctagatgcaggagctatcgagtgttctcggtgtggaacaatgaggaatgtaaacccaagccggaaatggtaagcggatgaagaatagaaagaagtgaagagtgagtcctctggttacgtcatctgcggacgcaggatgagtctctcagagtgccaggaacatttccaaataagcggaggactgcaagatgtgctcaaataggattcgttctttctgttattctggtctgaggcggcctttgtcatttctgccgttcttgtcgggcggtgggggtagtggagggcaacaatcacccaatgtgctatagctgtcatatgcaggtcccctctcttcttcttccttctccgcccagtctcgaattccgatcatctgcttgccacttgagaggggaaaagcctggtcaattcatctagggcatctgttctagaaaagatcattgcagatcgcttggtgatcgcattcaaccatggctcaggtatgtagtgaggacgcctgcttgctgcgactaaacctcggattagctccgatcgttgggttgaaaaattctgaccgtatcacagaaagctaccaaatctctagcggctcgcaatggtgctgtcctcagccgtacgcacatcatctctgctgcattgcacctgctcttcctcctactgcactttgccttccagcggccgcgttcactgaagccatacttcttcctggccgttccgacccttgcaattgaatattatttggaccgaatgggccggcctcgttataatgaagatggttccctgcgttccgccggcgaagatctcaacgccaccggtctgacggagtatatgtgggatgtactttactggacccagggatgcattgttactgtttgcctcttcaatgacagggcctggtggttgtgggctgtgatcccattatactccgtatacgccgcctacaccacgataatgggtgtgaagaagggatttgctggaatgggtggtggtgatgcgggtcaagagaccgatgccccaaagagcaagacgcagttgaagaaagaaaagagaggctcgaccatgaagtataggtgatcagagagtggaggatatgtacaaaatgagttgatgtagaatgggaactccagtcatttccatctttcctagttggatgccatcttgaccgtcattttcattctatatatttatatattggaacagaggaatttcctactacccccctcaacctacgagcttggctctgacgctgtagattttatataatatcatgatttcacttttctctccacataaacataacacgtgtgcattgatttctgaggcaagattaatcgaatccgtttatatgtgtagattcttgccattacctatgtaatcatccttattagcccgtttgataggagggatgcacaccgtgggtgatagctacatacacatcgaggtcgggatacccaaccgctcagaaattacacaaaataattccataactacatatttagtttcaaaaaagtcattcgttatgtactgaacatatctcacattaaacaagcctcgtatttcaaccaggaagtgagtagagaggaaaattgagatagagcgggaaaaagaaagcaagtctgtgcatgttgcaaatcatgagcatatggccatcgtgtcaaattatacggggaataatgcgtcgtgagccgcgcatggcattcccaagacatgggtttctttcggaacaaaatgattaagtccggatcaaaagaagaaaaagaaagaaaaagttgagagacgctgaaaaaaaccgatcaaagttcatctttgactgaaactgcggaactcttgatgctgcttgttgtatctttaaggtgggctgtggcggtctcgactgcctcgaagataacgttgctagccggtagattggcggctagatcagccagctgagacatggcgtcctttttggctctagcgagacgaatagctgcactctccactgcgctgggttccttgccgtagatagcagcgctggctgtagattgaatattctcaatggcatccttagcgacatcgaggtaactcgattccttgccgtaaactgcgctaatgatctgagccgatgctgttgagtacgcatcagctgcggcatcagtggctttctcgtaggaacccttgggggttccgtagataccaacgctggcggtttcgacagcagcacggagttggttattcgcgtgttgtatgatgtcctctacgctcggggcttctgaaataacagaagcagcgacggaggacgcagatccataagcctcattaacgtagctagaggcagacgagaaagcgacagccgggtacggcgtctcatatgcggctctcagtttgctcagcacactctccgtatatgaaggttgcttgcccgcaatcagttcagagacaagcccttggactgcctcaaactgcggacgcccattattcaccacttgctgcagaaacggcgttggcgcaccataaatctgctcactggctttcgagatgaggctttcccatttttcaggtacttggctataaagggactctacagggcccgtggaggttccgtggatgacagagctagcggaaatggaagccacagagagagacgaagaagccgcagagagggcagcattgtatcgggatgaagcatcttcaacaatactttgtgctttgccgccatctgcgggagacatgaccgagcttgcagatgcgacgacagcggcaaggctggcagaaactaacgaggacacatgctcgtattgagatcctgcttcctcaatgatccccttagagcttccggctggtgtgggggttggagaaccatagaccgcctcggatgccgtagagacaaagacagagtagtggtcatgggccaacccgactgcctcgtagtagcgacgctgcgcatcaaggacgaatggctcgagaccgccctgaggaatactggctgttgtcgctggtggctgcactcgagctaattgttcagatgctaagctgagtccatggcttagccgggaagacgcaatggatgagatatgggccagaggtccgacgttggatggtgtcggggtagcacgaacactgcggagcttcgattccagctcatctgtggcgtattttagagacccggaataggccgactctatggaagcgagaatctggacatgaacaggagcgctagattcggctattcggctaagaacttgagacttcgcgatctcatagagtactttagcctgatgtgtggaatcagcaaatgttgagctggctccgtccatcaaagattggacaaccggtgttggggtgccgtagatgacggacgacgcactgtggcagaaactcgcattagcgataattcgatttttgtgcagttttgaaacacgctgaatatgctatactacttacgcggctacagcatcgctatatttctcagagccgtcgctgtaaaccttttcgacagggctgagaggggtgccatggataacggtagaggcggcggaccaagcaacagagtactgttcactggccaatgatgctaccttctcaccgactccgttggtcgtcgatgcaccatagacagcttcgctaacagcatcgctggccccggcgtaggtatcgccaaccttacttgccagactgtcctggacattgtggctctcatcatctaggataggcgcttgatgcaaatttgcatctgcagccgcaacaccaaaggcgggtcttgcggagggctggttttccaccacaatatcatcgtccataacagactcgttaacgccatcaaagtccgcttcagcattgacagccgcggaaggctcatcggtaaagggggtttcctcgtaagcgtcatccgatattggtgttgccacctcttcggaagactcatcgttaccgaaatccatcttggcagcttcttcgtcagattcctcggtctcttcttgggccttgggccttgttggcggggcttcggtgcgagtttcaaaatgatcgcttacttcacgagccgcgatcttccagatcccaacatcctttaaccgaacaagttccctggcagcttgttcggcttcatgcatgccttgatctaagatatcactcgccacggctctggcgtcagatacggatttgtggttcatgccgacatttcggatgtcgttacgccattcctcgagttgggctttgagggcatggtactttgcccaatccttgtatgtgacaccatccatccacgcccagcgcatgccaatttcttgtaagcctagattgcgaatgctgtcgagaacatctattgtcgaattgacagcagcagtgactcggcgaacgagttcgtcctcgaacgagatagaccactctcggagtgcatgggcgcgatctctcacagagatagcagaagttcggatttcccgaatgagcaagtcgctagtagacttctcgatctccggggcgtccacctctggcattgaacccgcaagttcattgatgcgttgtttcatggaggaaatctgctcggctgaaaccgactgaagagcggtagaaaggctctggccatgggtgttcgcgctgcttgcaaccagggcggacacgatctccccaatacgtccctcaaggtcttcaatacctttatcggccgcgagagaaaatctttcctgccaccgccaaaggtccgaatctatctcctcgcggacttgctgggcttgctcggtaggagttagagtgggttggacggaagcctggggcgtgaaggttgaagtcatagtggtcgaagtgtggatttgttcttgtgacttggtagtcaaagagctaacgggctggactgttgagctactaaattttatggtcagcatgctatggactggataaaccaaggaacttttatgtacctatccacgtcctctatgacagcgcgaagtcgcttgccctccctgtagcttgccaatcgctgcccaatcttgacgagctggggctccacttgttcagagtaaagaccagtaacgtgaggccatagtgagctgttagcaaagtagatcgcggatgaccaggtatactgcgccccgggcatgacatgggttgccaaaataccctggccggtggagtaaactttcccgatgaaaggttttgaacgcgcgtagaaagggaccagttggccctgatagacattgagcacaacggtgctggcccattggcagtatggagagacaacatcaacgctttgctggacgtggggatcaatcttggctaagtaaacctggtgaaccttattttgagcagtccgtagtcttggtgagacttgatgttcccattgctcaatcccatatgcctgagcttgcttcaatgtcggcgctccatacttctcatatcctgatttggtaaattttgatgcaggggtataaactcgctgattaaaaactttcacgtaaggccgggcttgatcaacgtaaggcgccgcataaatatcataatatggcgtcacataaggttccacgtgtgaacgagcaatcaggtagggcttgcagactcgaggtgatgtctctgtgaggtcttcgagatgggttgggcacctgaaaaatggcgtcaagagtgcgtaccagatacatagcctgagaagtgaagatgttaaaaggggcttttcgctgtatacaagtatggcgatgctatcactcacctcacgataagtccgattgtccatcggacgaagccctttctccgtggcttttcaagatccattcggccctttgctttggtcgtgacatccgtcacttcattccctttcactaccatcgcaactgaggctgaccttgtcgaggccacgcgatcccctcgtgatattcgaggtcggccgaattcgcggaggacttcccttctacacacttagatcgagtcggctcagtatgaaattatcgctgcatcgggaataagctcacagcccagttgaatataaggcttttcgagattgtgctcgagactgcgtgaatcaaagcaaattagctgctgtaggcagaatgttcgcgtcggtcttggcgttagcaactttcacgggaggctaggtcaatttcaagaagaatagttggttacgaggaacgaaaggtcgaacgaatgggttttaggtctgatgagaaagaaaacgcagggacaactttattacaatatgaggacaaggcgatcgcatatgacacaataaatcagggatttgtttttagagctcagtgaggtcatcggtggctacacgtactgcatatacagcaatacccagctactatcgccttgacaagcaggtattgtcatatttcatgtattgccaaaacacaccgccgagtcggcgaattggaccccgggcagctacctggacaggctgaattgctttgttacaatcaagcaccaatgatctacagattacggttgtgaggtacgatactcctatcatataattgtcaatcttggcctcactaatcattctattcagttcaaatcggattgcccaccaacacaagccttccgtatgttcacaacctttgccattcccgcttgactaggaacatggtgaatatctgatcaaccaccaccgtcaaatcggcgagattcacgaattatggagcccgcagagaaccaattccgcgataatgcggataataccgcattccccgatctaatgaacgacccggcttatgacgaaagggaaaagggatttgacgacctagatacctgtcggatatgtcatggcgaggcgacagaagaggaaccgttgttttacccgtgcaagtgcagcggtagtattaaattcgtccaccaaatttgtctcgttgaatggttgtcccactcacagaagaaacactgcgagctctgcaaaacgcccttccgatttaccaaactatacgacccaaacatgccacagagccttccagcacctctgttcgcgaagcaagccctgatacaatgcttccggactctagtgacttggttgagatttgttctcgtagcatttgtctggctaggatggctgccgtggtcgatgcgcgcaatctggagggcattattttggcttgctgatggacggtggtctgccaatgaaaacgttcggaaccaggccgcacaaaccgctcaaaatggtctcgggcaactgttctcaaatggcagtgcagtaaatactgcagtaaatactgcggtaactgactcgattacttcgtcaatttctaatgctgtcgtctcatctactactgctgtaccatctgcacgatcgtcaattctcaatttcgctgccggagagccgctcatgcttaccctcatcaaaaaagtgatacccacacttttcatgccagcgtttacctcgactgtcgggcaaggcaacggacaggacaacgtcacggttagctcaatcaaacctcggtatccgtcatggctttcggacgtgaagttcttgaactcgttgacaccgtacccgacaatcaacaacatgatcatggatacattagaaggacagctcatcacccttcttgtggtggttgcgtttattctcctcttcctgattcgagaatgggttgttcaacagcaacccatggtaaatattgcagaaggagaacgtgaggctgctcttcagttaattgcaaatgccaacaatcggataaatgatcgattcaatgaagaaggtggtattcgacaacctgaacccattcccgctcgcgcggaaaatgagatcaacaatgaacacgctcaagcccatgagttggacaatgacatccttcctcattttgttccccactccccagctctgtcctcgaatgattccgaatacggtccccctgagtttgaagcggagctacgagactacaatgggaatgacctggaatacgaaacaggaggccctcctcctacggctcgggctctagctttccgggacctagtggcccgtactcatggcaaccatgaagagatgctgcgcattctccgcgaagaggctcatggggatgatctggattggattgtgaatgcgatcactggagcgaccgtagaccaagattcatcagcagggccttctattcgtccccatgatctcgacaatccagaagtctcggacgatgtcgatggtgttaatcttgaagttggagatggagaggatcacccgcctcatgcggacgccggaccttatgcccagaacgtgaatcacgggccgccaactcgagacaatgccattcctgtcaatatacaaatggaccgtcggcctccattgggcatcactgagcgggtgttcgaatggttttggggagatatcacacctgtagcccgtgatacagaagagccagtccccgaagatgacgaacatattgttcaggatccagccttggaagacccattcgtgccctttcccaggatggaagagaggccagcagccgatgctgctgccgcgaatgccgctgccgtcgcggatgccgagctggaccctaacgatatcgatgcaatcgaaggggacgatttcgaagggatcatggacctcattggcatgcatggtcccattttcgggcttttccagaacggcgtcttctgtgcccttctgattgcgttcacagtagccatcggtatctggctcccgtatctatggggtaaaattgctcttgtgttattggccaatcctctcgaactcgtcatcggtgttcctatcaccgcggttgaagtcgtcacggacattgctcttgatactcttattggtgtcgtgggatatctcatgtactggttcagccttttcttcaaaattgtactgagccctgtcggtgctcttttgcctattggagaatggattcctcgggacaactcagtcactagtgcatcgctttccctcatcgacgcaagcagtcaccgcttgaacaaagtgatcaaagcattcctggtcttccacgagtctgatattccaatgttctcagtgctctcgcaccaggcgcttaaattacatcaggctcgcctcggtgctgtgttccaatcgggctttgccgctgtcaagttcatcgtacatgacttccctcttcggcttgcgacgctcggtgttccccgtgccctgtctttcgacattgaccttgcccatttcaagaatcttattggccaagcccaacaacaactcaccaccttcgctaaatcatcgcttttctcgatgcctggaacaagatttatgaacgcaagtgcagcgaaagcagcctctgccacagtgccggtcgattatgacctagcagtctgggattccaaggatcgtgttattgctatcttcatgggctatttgctagcattcatgatagggcttctctatctacgaatcacagggctgctctctggtgctgatcggggacaaaggatcgagggcctgcttgctgaggtcctgatacaagccggaggagttatgaaagtcatcctcatcatcgggattgagatgattgtcttccctttgtattgtggcagtcttcttgatcttgctttacttccgatcttctctaatgctacagtggcctctcgtattgcttttactgctgcatctccgctcacttcgcttttcgtgcactggtttgttggcacttgttacatgttccactttgccctatttgtttccatgtgcagaaagattttgagaagcggtgtgctttgtaagtgcctgttatctacgtgccagaccttgattggattgctaacggttcgactctagatttcattcgtgaccctgatgatccaactttccacccaatacgcgatgttctcgaacgcaccatcactacccagctccgtaagatcggtttcagtgcccttgtatacggtgcgctagtgatcctttgtctaggaggtgtcgtatggggcttgcactttgctctcgatggtgttctcccgattcattggtcggccagtgcgccgatgctcgagttcccggttgacctcctgttctacaacttcgtgttgcctgtagttattcaatctttcaaaccctcagatggtttgcatgatttatatgactggtggttccacaagtgtgctcatttcttgcgtctcagcaactttttctttcctgaaagacacctggaggaagaaggctaccacgttcggaagacatggtggggtattctctctagaagcgagggtgactgggaacacccggtcgttggagatgaccagcaggctgcagctgagcgggaaaatcgtgacgtctacttcctgcgcgatggtcgatacgtgcgcgcccctggctccgatcaggtccgcattcccaaaggcaaccacgttttccttgaggtcactgaggacaatgaacgtgttgatgggaagcccgatactgccgatggactacatggccgatctagcaacatgttcaccaaagtatacatccctccctccttccggagtcggattgctgcctttattcttctaatctggctctttgctgcaaccactggggtaggcatcactattcttcccttggtcattggtcggaagatcattgtgtcctactcctctactccggctccagtgaacgacgtctacgctttttcaagtggtctttgtgtggtcggtgcacttgcctacctggcgtactactctagcaccgcactaaactttgtgcgagagaattcaggcgcataccttcgttcccctcgccaagcagcccaaaccagtctaggcctcgtgatgcatactgctcgacttatctacatgacccaagttgccattatcctcctaccatcactcttcgcgctgctcactgaactatacattctcattccagcgcacaccctctttggtgatggagagtcacatgttgtccatgtggttcaggactgggcgctcggggtgttgtatgttcagatggctatcaagttgactttctggcagccccaatccagggtggcagctgcggtcaacagtgtcttccaaaatggttggctgaagcccaatgcgagccttgccactcgtgcccttgttcttccaatcgttctcttcactgcagcagcggtcactttgcccttgtcatttgggttcattgtgcgctggacaattttctattcccacgtcggagtgcagcctaatatctaccgttattcttatcctactacactcttgattgtgctctctttatggatggcacatctactgctgagacgagtggcggtctggcgcagcaatattcgcgacgaagtctacctcattggagagagactgcataacttcagtgagaaacgaggacgtgtgacggtgtgtcgcgggtgatgacaggatgacgaaatggatggatgtttgataattttggcctggtattccagcgactctcttaccttttagcttcattggatgtacatttaactcgaacgactagaatccaagtattagttacttaggacctttcatcctgcccgctcgccgggattgtgcctgaggcatgatttttatatacgtaacgggtattggtaataccgtaatatcaatattcattacctgctgcctaccccgtggccccactattggccctctcttgtgaccgctcattggttaggcaacaggattccctcgatgcgccgttgtgtggttatcggccttcatcgccatcctcaaggcacccattgaaactgctcttgcaagtctttatcgattcattcctcctgtccgatggattgtttgccttttagcgactctcactatgtgttcttgaacgttccctctccagtgccttgtctctaatgctcgatactgtatctgtcattcttatcgattccctccgtaatcgccaagatgtcagtcctccggcatggaggaggaggcggctttctccagcggcgcctcacgaaactatataccgatacgaaaacatcctgcgagagtgttacgacagcctccaaagccctcgatgatcctgagctcgtcgccctccacgggagtttccagaaacagagggatcgcttgctagcatggggtctagattggagcgacgcaagcgccgcgcagcccaacgacatcgatgaatcgttgactgctgcaggtttcagcgatgtcgttgagagtgtcatgtcatcgatccaagaactactcaacgatgccgagcaagtacagcatttggatgcgcccatgcttccctcgaaggaacggaaggtcgatataccatcgaaggatacccttggtagcagacccgtcaaaacgcaatggacagaagaagatataactcgctcaaacaagatcttgaatgaactcactggctgtattgataccctttatgatctctcgcgctcccggcggacaatggcttccagcatgtcatccagcaggaacagcgcgcgccgcccacgacccaatcccacctcaacttatgattcatctcatggctcattctctgattccaaggagaaagcacaaagcccgaagcaaatgttcgatccattcacctattcgcccacgaccgcgcaccgtgactctcttaatcctttcctgcccctgaaccatcttctcattgatcgctcagctctgcaactatacggtgcggcccacgataatagccctcctccgtatgaacctgttgcggcatcttccaattcgcgtgccattggacgcctgaagtcatcggcatcgcatcttctcacctccacaaaagagtcccatgtctccgtgcttgtcgagtttatgcctatattggcggagtcaaaaatggataacaaaagtgctcgattggaaaagctccaaaagtctattgagcaattgctacagaacgccaggatctcacacttagggttgatgcgatttttgggctactgcattgataactcgaattctcgctatgcattcctttatcagatgccggttgactacttcccattcctacagaatccgagtgacttgttgaaggagttaaagcctaagccattggtcgctcttcttccttcggcagaggagtatcgggagaatcgagttccgaaccttgacactcgctttcgattggcttacgatctcttgatgtcctctctccacttgagaagtcaaaatgccgttcatggaaacatcaacagcagcaatgttatcttctttccgggtcgtagtgacacgagtgatgatgaaagtggtcttgcacctgatcttcgccgtccttatcttacttctccggcacggttctctggggatggaccaacccctgagccgttatcttcggcaatgtatcgtcacccagaggacaagagatgtgttgaggatgatggcgcgtgggcctatgatctttactcgctaggcctcattttattagagataggcctatgggcaccagttggacgactttggaagatgaagtacgaccgttcatggttcaagcatcgagtggaagatctctatgtcaaaaaacttggcccgaagtgcggcggtgcttatcttcaagccgttcagttgtgccttgatgcccccaacttccacttatcgacacagccgatgactgacctcggtcttcgtgttccacaaatctaccactacccggtactcgacttgtcggaccctgatggcaccttctctttttcaatgaatttcatgtacacaatctgcaagattctttggtcatgttgccggattgatatcttttcggcaccctccgcagaagaattggatgactgcctcccgcttgctcttgtccctacccccgagccggtcaccattgaggataaagtcagggcatacaaatcatcgaagcgcgagatgtctaattacgacaaacaacttcccacaattcctaccgatgcatggggtgtcgtgaatgaagacaagttcattgaaaagccacacaaaaaacggaccgtcaagagacttccgcacttggaaataccagacgagcacctacaagagtggaatttccaaataatgcctcgagtgagtcgccttcttcagaaggttttgaaggagtcttctgagtcgtgtggagtaaacctcattatgactggcgagtcgcctgaaagtgccaaaacgacgatttgtgttacgtgcgccagtgtgaagaaagttcgaatggcccttaagaagcacttcgctcttggtcgggatgactgggatttgattgtcctccgtggcgatatcgagcggtccaaggttcctcggaacaggcgccgaaggccggctaaggctcgcccgaatgtgtccaatgatacaccttttcgccagcgagagctcaatccatgccatcagcagcgacctctgtgcggagcatctatcggcgcctttcagaacgaagagcacttaccccctgtctcatatggtggtgccgtctttgtcgatggcttgccgtatggtctaacagttcatcacatgttagaagctcctagcgaagatgagagcgaaggcagtgactcaaatcaagatgccccttctcggtccgcggggaactggccccgtgatatatcaaatatcccacatcctggattcacgtacgactatccagaggatgactcatctgacgtgaacttcgacttcgaaatttccgatctggaggacgaggacgatccatcacacggtcttgagtctggatatgaagaattctggctttcagatgaagattcatcagatgatgactccgtcggccccgatgacgatgacggtgacaccgcgtccatcggcgatactgctggtatcgaacctggcgaagaaccccggctgcttgtcactcagccagctattgacgatgtacacgaagacttttttccatctccagaagatcgtgatgacgagcacctagcctcacattccctcggctatgtacatgcatcatcgggagtacggcgctggacccgaaagggcctgaaacatgaaattgactgggcgctcatcaaagtcgatgaagcccgtatggaccctcgcaacatcgttctcgacactactagatccagtgccgctcggccgggacgccctatcccgccacaacccatatttctgaaccaagtagcccggatggaggagctaggtggcttgcaagttcattgctgcggccgcacaagtggactgcaaacagggcagatatccaaggctatgacattggtcaaacttcagggacgacattcattttcaaccagcttttccgtcaatgggaattttggaggtaagaggtgcacttcagcggatccatgtttttgtctatacgatccttaattagatacccttgtttgttttttcatgcacgcccatcatttgttgcccttctaagctggtaaacatacagcaccatctcaccctaagacatcggctcgtatcgagtaagcatttcatgaagctaatctcttgattcgacagcgcctggcgactctggcgcatgggtcttcgaccgtcccaccggccgtgtttgcggccatgttctcgcctggtccgcaaaaagcaacaccacctatatttcccctatggaggtcaccttcgatgacatcgcacgcacgctccgcgcctcggtcgtctctcttcccggcgacccgaaccgatccatgagctacgtcgaccctacctcctcacagtctgctcaataccgctaccaagcccagcggcttccaggagacttgggccgtttggcttttgggtctggaggttctcccggtccgcctgtaccgccctatccccatcattatcctccccctcagccttaccattcagcctatggacgtcctccacctccgcctccaccccctcccggctcccgagaagctcatgggcctgtgtacagtggcccagtccctccaattccgccgtcacttctggctgggccccgcaatgtcgaacgacaacttgcttgatttttccagattttggaaaatctagattatgggaataagtttttgagactcatgtcatattggcctgagtatgtcggtttgttatatgattatgttttacggatgttgaggatacccatgatggagcgatgtttgttgtatttttgttcacccgctataaaaattatctgacgtgaattattcgaagagcagtattcatgaaaggggttattctcgattggaagtagatacaacacagccattgagaacatactgatctcgagactagtgctaactcggaccgtcggcttcatggtatcaaccctgcccagtggtttcccttcctttttacgatcattgtggcccttgaactagaatgcgtgtactattaccatttgcaaccgcaatgcctaacaccatatcagagaggcccgaatctcccatcttaataaattatatgaaacgccaggcagacatagctgataattttgactgcgttccaaccttggaacctcctaggtagttagcagttatttattagctaccattagctaatagatggcggcggccacccgtagacatccaatcgtcttttatattcctaattctgggcccgtttcctctgtatatatgcccttgctattgtacaggccatggtatatcaaatcccctattgtattcaagccagaatttctacttttgcacaggctttcacgaatccaggactcaaacattagctaatcatttgcagaggaacatcccgatgaagaccacatagccttttatatcagtatttagagcaatagaagtagtgaactaagtatacagagagaaaaaaacagaaagagaatgggattcactacatgcatctgtttctatgagctattaaaaatgctcaatggagaacaaagaggatcgaaaaaggattatagaatgtcatgagttgaaaggtaactcattatgaatcacgcccgtcaagccaactgatctacatttctatataacttctacggacttcataatttgttggctatctatggggcattgtctcaagggatattgataggactgatgttcctccatattggtgcattgttctttcatgctctctggtccaaaataggaaatgacctatcaatagctcgtgacttgaaaggtttcgccatttctgtctatcttcgaatttctatgtaaacaacgatatcgactctttctccgcccgaggcaaacgcgtcttcgtcacagcgcgtccgttccttcatctctgtttacttcttctctcattcgttccttcatctctatcttcttcttttctctcatcttcgatattttaccaaaaacttcttgaatctcataactctcatatcttgtctttccttgaatccggtcatacctcagcggttccgcttggctctaggattcaacgatgcatcatttgcacactttccatggagatcccgagctgggcagtcggcccctcaaagaatggccatgcagcccggatcgagccatcgagcttctcaagacgttgtatgacagtgataagcctttcttcacgaagaaaaacctgagagccgtctccaaccaactcaatcgtcgctacaatacacgaaaaaagaacagtgaacaaaagcaattggtctctgtcaagggcctcagtggctcaactatctattaccaagtgattactgggcgagtgctcataggagcagggaagaacgaagactgggagatgtaattcgttaatgattgccatccagggctcttctggcacatgaccctagctaacacatccacaccacaacagggaggaaccaaagatccgatacctttgctatgagcagctcacttcgtcagtgaagttggggagcattgaactggttgaagccttttttccattgcaaattgagcattttatgctcacacgcgcgagtgacaccaagctgcccatctccaccgagtacattgagaaccccgtacctgtggacgtgactctccggaatattctggatatatggaagcacaccactgaattccagaagctcgagtccctcctcaagcttgtcacccctcgtaaagtcaccaagattgtcggtatcgcatctggatcaatggaatttggtcccgacgatgaggattgcacctatcgtagcgccatgcagcattccatgatgatcactatcaaagagtctattggaaagatgacagataaaaagatcaaatgctatgcccaggatcctcgctacaccgccgttgacacctgggctcttgcggagtataactgcgaggttctggaggaccccaaggctttgcttgaaattgacgacgactgtattctcttttcttgctgcccggctcttccattaaaggagatcactgttgactttgctcggcctgctatgcttatttgggatcgagttgtcgatgaaccaaaccatgggcggtaagtcttattctgatgttgtattcacctcatcttgcttactgactagttcgcctagccacaacccgaactccactcgcgtacagaacatgatcagaaatgaatacgtctgccatgaattctgggacttgcgcgaaattgggactgctccctttaggtctgaccttgttgcttacatccgccgccaggcggagtaagatcatcgcaaagatcatatggcaaattaaggtgtgtcaggggatgggcaatgtgtctatttggccttgggggaaatgattcggtttctatgagttttcaggggaatttgtaaggccaataggagtctctgattgagtgtgaagccagtttatgtttgaagaaagcatcctgatttccgcgtctgcacaaagctggagtcatgtaattgtacccttcattgtgtatttatgtctttgtttctctgttgatttagtaattaatctcctctccatgtcacaatggtacattaaacggggctttccaaccgcccttggtcctgtgaatggagtaaaagacatatggctgccaaatataacactgccaccgaagttctagagtatatatatatattgcagtgggggtttccagagtaggatgactaagcggctatatagatagttagcaacgcagacaccttccacttctcttctcagtagtcaccccatggtgttctcctctctagcaccctactactcccagtgacgactctgctctcacacctgtttcgcaggcagggttgtcggtgcccctatcctagggtcccctcttcaatatacacattccctaattttcatccagagtatagaaaggtgattgacaacaggcgtagttttagacaataaccgtggacttgggtcctagtgactttgggtcttagagaatcaaacccccgattgtgatcaatgcagaccaccttgttctatgacggacataacggacccacttggggtgacccacttaacgcaaccttatcccaaaaaggacctgccaacttgatatccatagttccactttgtgtttgtatcatgacgcacatttgatgatgatcactaggatctctagatattgtcgacaatgctctactaattttgtccgcctgtaattttcaatacctattcacctcgtcaaaataatattcctggcaaaagggggtttcgttggctgtactgaaattaaaccagcttttgagttgtctatcgcctatgccatgggatcacattgtatcgtcctccattgaggattctgcaacgtatgcgccttgagaggaacagctgtcggtgatatgatggggtctagtaaattagttgtgtagagtgcatgatcctcggcgtctgatatcgatgtgacaaggcactgagacacaaaacctccacaccaatgagttctcttgcgttggggctagtcaaaggcaactccagggcctatcaggcacatctagctgctcgtgctaattctactcctcctcctcctcctcgtcctcctcctcctcctcatccatactctcccattcatcttcaccatcgctctgttcgagatctgtctcgttggaaaggacgctaagcagctgtaacaacccggcctgtgtgcgccaggcatctgaggatggcaaatttgggccagggccaccaaggcttgcgctatccactgctgaaggctcatccgtgtcaccggaggcagaggattgtttagagaggttaggggccaggctgagtatgcggatgacttttgtaggaaagacacgaggaatttctccgccaggtattccgcctggaacgttagagtcgcgccagccgagggtctgcaatttccggtgttagccgttctgtttttatctttttgcaaagaagtcaaaaaggaactcacggtgtaggtagtcataatggcatcatcagccaacgccatgtaactgatcggcacagcaagctgtggtgcggagctggtgagcagcgagtatgaggcacgggcagggttcttcaaattttgaaccctattattgtcaccaagggcgacgacatagatcctatcttgaatctcgaacatcacacggtggttgcggattgataaccaaccaccaaggtcaaagcttgacccgtctgattgacattccagaatgtagctgttcgccgcaagactagcttcatcacggagagccttgcggaagtccgggcatataaagacacgaccagcgcgagagaagcccacgaagagatcgccgttcaacattcccgccccccattcatcatccccatgccagacatgatccgggtcatccggtggtgacagtggaccttcagcgacctcaattggtaccaaacaatcctttcggaaagctccgggtgtgaggggttgagttgttaggccaagtcgcgcagcgcctgctagtgctgcactcgtagaagcagaggcggtctttggaggaaggatgtgatatttttcggtcgactgggacggctttaaattgcctaagagtgcaccggattccttgctgtgggcaaaatagccttttgagcccatcgaataaatcacaatatcttcgctttgatccagatggccaatgccacccccctcaatcctcaggtcggcggtcaacttgggaggtcgctgtgtcatatcgtacacaaacccccgaccctcgttggagacaacacatagagtccaataggacaattggaaccctctcgtgtggcaatcatggcacaatgtagcgatacgccggaactctccacgcttagcaccttcaaggtccgtctgccaaacctcgagcaaatctccttcactatcgaacacggccattccatcctgatactccaagtgtgcgtgtgggcgaactccgtctccgtctccttcggcgtctagcacggaagggagtcgccagaggaggcggcccgtgtccatatcagtgacattcaatccgccaccatgggaagtggaaatgaagaaccggcgcttgaagtcggcacggaatctccaaatgggatcattaccgatttgtaccaccgattcctgactgactggatgcggttgggcccaattacgggccagcagtgtctggcgcttgcacaggtctttccatgatttcgtgccctcgaatattttgctaaagctgtgggtatcggcgaggaaggagaattcacggctacccccaagcggctggactgttttagcttcggatccataaatagcttcttggtgagtgccgtcgataaattggtgccaagccttggaggtcgcggtcagggacgcaaggccggaaatgggggtgaagtgcaagatttgcaggacaatctctgggggcaagacactgagagggtctactgtggatgatacggcagtcatattttcaaaaacaagcaatgcagagttgtcgcagaaagcaaattagagaggtgggggttcgcaatatttcatcgttctccaccatatatacgatgacgtagccggtttagacccgtggatacagcaaatagcccccggggctccaggggaagaacctagagccttaaaaattttaagcttaaattattttgatatgcccagatttcaatccgccatgtcctccaagtactagattcttcccatccaaatctgcgctgcaatgcctgcttcagttcaaggtacctcattcgctcttccatatgccgaacaaactctcgctggtctgtatagcgaataatatcttttccaagggcattactccgtacctattgtcatatatgacgaagtgagaggctgggaagagttgggttttgctgtaccccgcaagtacgagcgagtacatacgacaacccagcataaattgaaaaatgtcccgtcgcttggcacccaaggccgagcgcaaagcagcccgattacgagacttttctggtttttccctcttattcctcatcaaccatgggtaatgagacccttcagcagttcgctgccctcgacctcgactacttgattataggcggaggtaccgcaggtctagctgttgctgcacgcctcaccgaggacactggattccacgtgggagtcatcgaagccggcccatcggtcttgaacatagatgataatggcgcgatcaatgttcctggtcggtatggcgaaaccatcggctctaaatacgattggaaattcgaaactaccccacagccgggcctaggaggaagatcactaccatggccacgaggccgtatattaggcggcacaagtgcgctcaatcttatggcctggaaccggggtcatcgcaaagactatgattcctgggcggaacttgggaatgagggatggggatgggaagatctactgtatgaggaccagctttctgggattcgcgctctgtcttggatctcacccgctgatctttgagatactgaattccttccaggccttttttccgccgcagcgagaatttccacccaccgagtgccgctcatcagaaatattatcagtcttcctatgatccccaggctaatggaacgaagggccctcttcatacaactcatgccaagcagtatggtcccacacaccaatattggcatgagacgctcaataatctcggggttccatccacgcgcgatagcctggctggcgataatacaggtgtctggaacatggtgtgcacaattgatccagatagtcaggagcgcagctactctgcctctgcatactaccaccccatctcaaatcgcccaaacctacacatactgactgaagcaactgccatggagatcctgtttaattgcgacaatgatgattggtacgcagcaggggcccgagtacgctggaacggactggaagcaaacatcaaagcatacgaagagacaatcgtctgtgccggtagcgtgcaatcgccgcaacttctagagctatctggtattggcgatcaggaagtgttaagagctgctggaattgagatgaaagtccacagtcccaacgtaggggagaatctacaggagcatatgagtatggaatataaacagtgttccttgtgatctgagctgacgtgtttaagtgacggccaccatcttcgagatatcctcgacgattccaacccgagatgacatcctcaaagaccccattcagcgcgaagctgcggaccgcgcgtattacgcttctcaagccgggccttggactgtgatgccctgttcagtggcgtactgtccgctttcgaagatcctatcgcccaaggaatgtgatgaattacacacccaggccaaggaaatcgcgcgagagacaggaaggacacatgacgctattctggctggccaattcgagtacggtcatgcgcgcggtcaaatcgaatatctgttcgaccttggtaactggagcccatattttgtctctgagccaggaaagaaatacgccacaatgctgcaaatgctgcagtaccctttctcgcgcggatctatccatatccctgctatgggcgaacacaattatgaaaaggccacaattgatgataaacccgtgattgatccgcgatattttctggggcctggggagattgataagaaggtcatggccaaagcactcaggtggggagatcgaatctgccaaaccaagcccttggccaaactcattcgtcgtcgagtctttcctccccctgccaaggaagcagactctgaagagaaagtatacgaagagtttgtctcaaattatactgtcactgactggcatcgtatgtttcccctccaagattcattcagcaaatcactaaatatgcgtatagcggttgggacctgcgctatgggtgaagcagatgggaccaatgctggagttgtgaatgatatgctacaggtgcatggcgtctattgtctgcgggttgtagatgctagcatcatgccattgcaggttggggcacacatccaagccaccgtatacgcgattgccgaaaaggcggcggagatgatcatagatgactattttgctcgaaacggtccccgatgaatcttgggcttgcatatgatatcttatctatatggccttgtcaatatcttgcccggtaatcgcacaccaagaagggcgtcacgacagcaccactgattcatattttccaagttgtcattgttacacatgttccgagctgaaattctgcaaatcaagacttagtttcctgcgaacctttttcatttcatgcttagctggctcagcatggattgctccacactcaagcatcacccatggctatgaaacatagctgtgcacacacgcaaccctggagatgttccccagacgaagatgctccgtggcacatcggaatttttcaataaaaagaaacaccaagacttaggatggcgcggattgttaaacaaacagaccggggattgaaagcagaactccccgatcggctaaagccgacgtttaactctccccctccttgagaggggcaatcttcttattttgtgccgattgcccggggaattcattcggatatttttccagggtctcactggaaatcttattaaactacattcaacttcgtgagctaacaagacttccacatctcataccatcgtcaactatctctttgcatctctcatccgacacggaaactgattcccgcgcgacttgaatatataccggctcttgctcaacacaccatcgcatatatcctctatcctactatcctacaatgatttctggaatcgcccacatcaatctcaccatccctcagggcacattagaccaagccgaggagttctacgggactaccctcggactcacttcggcgccggtaccggagctccagaaggggacaatcttatggtattgaagcgagctatttccaaaagaaaaaaaaaaaaacatcattttctaatatcaacaggttcaatatcggctccagtggacagcaagtgcatattacccatggtgcgaccgatccccaagctagccggcacccatgcttcaaactgccttcccgtgaggaactagaagagattaagacaagcatttataaccatcacgtgcggggtggtcctgcagccccaatggctgccgataagcctggcgaggcgaactcaggtgagagatgtcttgatatcattcccgcgtacggtttgctgatcaactacagggacccaagggaaagaatatcctacacggttcttcgctcgggattttggcggaaacttgcttgagtttactatgtaaatattctgttttgagtcgagttctaccaaagtgcgggtgtgggatcgaagagaaacagtctaatattaacaatttcaatcgatatggagtcagcagtcctgtatggtctgtctaagcagctactcctctgagttcatttcagaattgctagggaattgtcgactcatgaggtagttagctctggtctgttcagaacaataaatgtacagccacatacgatgatgagcgcattgtggcgtaaatgcgggccaaacccaccaaaccgacgaattggagttgccgacgatcccgttgcacagccccacctgatacttggacgttgcgcttcccttcaatctcaccaacaacacataccagacaagaatacacaacatcatctactatgggtaaatcaacacctatagaaccagctccagcctatgatgacctgtttcatgagcgcggctcaagctcacgaaatggtgtaagtacattactcacccgaagggatgggtcataaagtccagatggttccatcaacatgctaatcaacccaaatgaatagtatgctatggtcggtcaaacagacgataccaccgatgaaacccgagacgtggaacagggtctccacattcatggcgtgcccgcccccatcgaagtgacagcggctggtgagctggatcaacacactcactgtgcggaatgtgatcggcagcaggaacgcagagagcgacgggagagttcccagaaagcatgtggcatggttgcgacaaccttcatcctgatctctttgttcctgatgatattaggaatcgttatcgttggagcttggaaggatgtccgcatgaagaagtcacacggttagagggtgttgagtttcttgaaatacctttgactagaatcatatcgcatagtagcttactgtttgttgtttacttcctttctttctgttaatcatggagagaacttgattttattgaatattgtattgaatattagaattgaatagatcaaccccgtagtcgtatataagaggatccaaaaccaaaaagaaaacaccatgcaatctctaacaagataaaaatccaaccaagagaaaaaccatcaagtcataatagatgtttctgtccaaaacatatgcaaacgaatctaagcagaaccgagatacttgagcacattctcacgttcctcaacaggcaacatagaaagcacttgctgcacaccgcgcagaccaccctccttgttcccaataaggagttgagcaacctcagacgcgacgccatcagtgcgcagagattcaaccttgctgtgaataaccttcttgttctcctcgtaccaagcagcaaccttttggtcattgtgctcgagttcctcgtccaacagaccagtccaggcgtgcagggtgcgcaggtgcgcagcacgaggagtctcgccgaaagcgtcggcaccgggggcagggggtgccgaggcggcaaccatgcgcttgacgatggtctcttcgctaagacggcggcgcagccgccagtagaagaagcggcgggagttgacccactggagaggcttgcggatggccttcttggcttgcatgcggccggcgcggtcgtgcaggtcggcgaattgaagtgcaatctgcatgtacacggggaggagctgttcctcacgggcggccatatttgccttgactgagctgagctgctcgtgggtaagggaggtgtcagccagggagcggcggagctcgccgtaggtcgcatccaggcgggccatggtgtccagttgcttctcgcgacgatacttgatgttcaccataccctcgggctcgaggacaccgccgcgggattcttcgtcggcatacatctccatctggtcggggttgatagtggggtcaacgacgacccaagatccaccgcggagctctccatgaggaggaatatacacgaagatgggctgctcgtacttgacgagagcgtcgacgatatacgaaccgtacttgagaacctcgttgtacatgtcacgttggccaccggagaatcctctccagttggccaggatcatgacgggcagctgctcgccgttgttgaagtcgcgcagagcttgggcggtcttgtaggccgagttggggtaccagacaccaccagcctcggtggagatcatctccatggagtctgggttggcgggatcggcaggggtgacgttctccaccgaacgagtctcgacggcgatcacacccatggggataccaccaaggcgggcacgaccgacaacgacggtgcgagcccagccaccaagggcctcctcaaaggagcccttgtcgaacagaccgggaaggaagccgtcgacgtcctccttacctccgatgagccatctgacatcataagcctgcttggggggagggaagtagccaatatcacggtcccaggtatccgaccaggggcgaatggggataggagcattcttcttgtcgggaacgaaggacatccactcaacgatcttctcaacaccttcgaagtcatcggtggcagtcatgtgagaaacaccgtttttatacatgatctgagtgccaccaagctgaaggttggaggtgtaaacctcgcgaccgagcagcttgttgatggcaggggcaccagtgagaatgatgggctggccctcaacctggatggcacgctgaccgagacgcacaaggtaagcaccgataccgacagagcggcaggtaacgagagtgatggtgaagatatcctcgtaagccttagaggtagcaccggcaatgagaccggaacccttcagacactcgacaccaagaccgtccttggcaccaatcacggtggtgatcttgtggcgctcctcgccctcgtcgttgatgagctcggtgatgacctccttcttcttgctggcatcgaagcgcttcttaatctcgggagtgaggtaaaggtacttgaaaccggcctcgggcttctccggtttgttccaagcaaccgagaagaagggaatcagttcatcggccacaccgatgcgggcaccagagttagcagacaagtagatacggggaatacccaacttgcgggcaagctcagtgcacttgtggaagaacttgtcttcctggggaccgaaagaaccaatctggaaggtgatgtcgttggcaacaatgatgaaacgtctgccgcgggggtactcgggagtacgggcagtgacgatccatccaaccataccgtgggtgttggtaccaggctcgcgagacacctcaacaaggttgtcggtgtcgtccaagaccagctcactgtagtcaatgcactccccaacaggggggcgcttctcatacagggaaggaattttctcggcaatcttggtccagctgttttggaaggcctggcggaaaagctcggggaaatcgtacacgtactgggttcccatcaagtgagccttgtagcgcttgggctgcagccactccttggtagggtacggggtggagacagggcgcagatgcatagatcccagcttggcagtaccaccaatgctctggaagatccactcgcccttctcggacttgcgctcgatatacagctcgatattgataatgaagccgtaggtgttgctgataataacacgcagggggtatggcataccggtagccgggtcggtgcaaaggatgcgaatttctgcgccagtgacacggaggcgccacagacggcggccgaagcgatcgaggaaaccggccagcgcttgctcaacatcgactggctggaggttgaatacaggagagaagttgatgaagatgtggttcagatcggagttgttgttgccaatgatctccagggcgtccaggatatcgttcatgaggcggtcggcctccgagatcagatactcagcggtggggatatcgtcacgcagacggccgggacgaaccacggcacgaatgaagtagcgcttgtcaatagtcttgtcattctcaacgccctttccaatagcctcgtagacgtgaatgttacggttctcggtgaaaacgggtttgatgttgaacttggatagacggccgagctccaactggaaggcaagagccggctcactgtggcggatactcacatcttcctcgtagtggggcccacggaaggtgaagtaaccgggatagacaccttgcttgccgcagatgaaggtgacacgacgaatacgacgggcaaggagctcatccttgttgtcagcgagcagctgcttcatttgttcgacaagttccgcatcttccatgtcctcgatatcgcgaatggcaatgttgcagactccagtgagctcactatcactcacaggcttaaggccggggcgacgcttgccttcaaggctggcaataaggccctgctcgatggggcgcttgatgttggagccaccgagagggaagacctcaagagccttggagaggagctcctcggcatcctccaagtactgcacgggaatgataacacccttgcgcacggggtcactggcagcgtcactcacaaagagggacatgtcgccgatggagttgatccgcttgaaggggttgacctccgtaattggagtgcccggtgcggacggctgagtggagttaagaacaccgaactcacgctggccgagcttgccaagagtgaagtcccaagacaggaagggctgctcattggaggcattgtattcaattccctcgagagtgtatgcacggtaggcacggcgaacgtagacttccagggaggcgagggtgacccaggggtcagcatggacgaagaaccgaggaagaacatcgaagaccgtgtacttcgagtcaacaacctccttcaaaacatccaaggaaggttcgcggtgctcccatccggtctcaccgtagcgagactcgacaacggaagatcgcagaatgtgctccatctgcgacaggcgctcatccagagatggcatagcgcactgaatcagaacctcacgggccttgagggtaactttggcagaagagcgagactcgagctccgtcaacttcttgaggatgggcttgaagtgtgtgccaacattctcgacgaggggctggttggggcggtacatgtccaaaatggccaacaccaggttgttcttcgaaccgatgcggctgtgtgagaggacgatgtggacaatgctggtgatgtcatctttgttctcctcgcggagcttaagaatgacatcctcgtcgcgaaggttatgggtagaaaacaatttctcaacgtcatagtactgttcgagcaagccaatgaagacattgtactcgttggacttcaaaccatccatgtacttgttaatgacctgaaccaggggcaaaagggtggccttgagaatctcagcatcggcagggccaatgttctcttcaatgaagcgaacgatggccttctggagctgcttggcagggaactcggccttgcgggccttggcacggtcaaccacgttctgcagctgagtatccagcctctgaggaatacgagagtgaagcgcagaggactgcgcattccactctccatagggaagatcagggttgcgcaacacctcaacgagatccttcagggtggtacccatgatgacctggttgtcgaaaccgcgaagaatgttctccaaaatgctgtggagtaggaagaatcgctgagagggcttgttaccgagaacggtaggtgagccaagctcgggcagctgaccagtgaagggctgagcgtgcttaactcgggaagggtcatccagggcgaggataccgaggatatcaccggcctctaaagtggcaccgggttgcttgatgagctgcacgataccatcctcctttgcgatgaggggcatgtacatcttcataacctcaacttcggcgtaagactgaccagagcgaatgtgctctccattctcaacggtgaacttgacaagcttaccgggagagggagagcgcagctgagtcggatcgttctcctgctccaagaggcaagttttgccgtcgacactgagacgggtggcagcagcctcctctttccagtaaacgttgtgactgcggccgctgaggaggaccagcaagccaccatcagccagagcacgaacaccgactgagcacttggaaccgttgatgaagaggtggtagctgtccaagctggcacgagtggcggtgaacttgtaacgctcgccttcatagatgaagtcgacggggaaaactgtcttcaagatctccttggacgggacctgaccctttcctagaccattgcggtattcctcaatgccagcctcgctggcgaggtgggccttggtgacggcaccacaaatgatggcgacgttctgatcgggacgctcagcagtcagcttgttagagataagctggtcaagccatccagtggtgatagtgttgtcctcgaatgcaggggtttcgagaagcttgatcagatattcgacagtggtgcggaaatcaccacgaatgctcaattccttcaaggcaacgaccatatgcttgcgcgaagcggatcggttctcgccgtaggcgaaaatgtgaccaaattgactgtcggagaaactgtggataccaccagcagtaccgacagagaagtaaccccagacgttggaggaactgcggaagttcagctcgtgcatggtaccactggaaggtttgaaaccctcgccaggatcctcggatgtgatacggcaagcagtggtgtggcccttgggctgaggacgacgctgggtctggaagctctcttccttggagaagtcgaagtcaatttcggtggaggcattggggtcgacaccgtaaagaagacgaatgtcacgaacgcggtgcagggggacacccatggcaatctggagctgggcagcgggcaagttgactcccgaaaccatctcggttgtgggatgctcgacctgcagacgaggattcaattcgaggaagtagaatttgtcatcggagtgtgagtagaggtactcgacggtaccggcagaaacgtatccgaccaaccgaccgaggctcacagcagcgcgctccatggcctggaaagtgggctgtttcgcaatagtcacaggagcctcctcgataatcttctggtgacgacgctggacggagcaatcacgaccgaagagggaaatgttgttgccgtactgatcagccagcaattgcacctcgagatggcgagcgttaccagccagcttcataatgaagataggcgatcccggaatctcgttggcggcggcgttgtacaaggcgtagaactcttcctcgttctcgacctttctaatacccttaccaccaccaccttcggaggccttgaccatgacagggaaaccgatttctttggccttcgccaaaccctcttcgggggaaaaggtgcaaccctttttatagacctcatcctcgactgtcacgataccgtgttcatcgagtttcacggcgtcaacaccggttccagaccagggaatacaaggcacaccggcgtgctgtgcaacaatggtagacgaaatcttgtcacctagcgagcgcatggctgaagctgggggtccaatgaagataatcttcttcggtgacgcagcgagagattcgggtaaccgagggttttcagaggcgtgacccctacacaatgagcgtcagtatttcgtttctaattttcctctctcggtcttctcggtatctccaagccacttaccatcctgcccacacggcgtgaacatccatccgctccgcaacatcgacaatcaactcgacgttggcataattattattattggttccaccgggaacctcgacgtattggtcggccatgcgaatatagtcggcgttggcggtcaaatcttcgggcgtggccatcacggtaaattggatagcccgctcgttgccgaaggtctcgtaagcccatttccgcaccgagcgaatctctttcacggcggcgataccattgttggcaataagcacctaaggaataagtcagcctcacggtcaatttcccaattgtttcccctcgcaaccacggttgttctttctatttcctacgtaccgatgtgataacggagtgaccttcgtgggctgccacgaaatctttcacaacgctaggaggtgctgattcaagagcgttgccaccgatgaaatgtgagggaatgtcctgtttgctgacagtcgagccgttgccatttgtgatactcatgatgctgataatcacaggtcagattcccgtataggaattgagattctgctttcgcgcgggatgcaacagcgctgattaaaaagtcggtaatgtacaatgctgggagtggcggaaagagcccgagtggtggacgtgcgtagaaaaaggtaaggtagagagagggggagaagaggagtaagataatcggcaggagtaagctctggggggaagaaaggccaagtcagcatgtgtagttcaagatctcggggcctgaagaaagatcgcgtcgaatgcggaattggcctgccaccggatagggaaagggtagcagtactaaccgggaaccaccaaaccccgaacaagaaattctatgtaagattgaatataggaattgaagagatgcagaactcaagttcaatcataaaaagtccacggggggaaaattgctgagaagatgattttctggaggtcccacccaagtggagatgatcccaactggctgtgattgattcccttgaatggccgaggacacatgtacctccccatactgttaactatgtaaaggtaccttcccaggaacgggctcccccaactccctggctttgttgggccgggttccactataatctgttgctcaccacttctgccgatttttgatttgcttttgatttgattttctttttgttttagaattaaatgttgaagagaccaatccaggcgtcactattaggtagtataaaaggattcactgctagttcactaccggtatgtaactatacatatcctatgatactaccccagtttggtcagcagcggaatcatttgaaatcattcaagattcaatagtaatggaattactcaaacttgggaactccaaggtcagactgtttgaacgatacagaatacatatacggagtacatatacggaactccgtaagtactccatacggagtacggagtacggagtactatatagagatcgataatctagattcaaaaatatgctccacgtcattgccaatctgagaatggcgtacacgctatcccaattcggccaccttccatcattcaacacgatcaaccttccagggtttggtgcaaattgcgtatagaaaaatcctcgtagaccaatcatattcgtgaccaccatattccaactcaacccattctccccagagccatggatctgggccacaactcaactacaacgccaaaatggacggttaacctacgttgtacatacaatttataatatggagcataacatcatgggtattattcgatcttaaatgaaaagacaatcgctgagacacagcttagaacgtccccagaatccaccgggggccatatcgcacaaatgaaccagacctggctggtccgagaccggtcaacatgcagaactgtacaggaagggatgtaaccagggcggtctgcaccctcactcctcttgcggaatgcagtcgatcacagtcaatcttagaagtctgtaaaacaaacgttgaaaaataaccctagcacaaaccacccagtcactaaacccccatgcaaattccataaatactagtggcgaagagaggaattaaaacgtctctcccaagtcgctgacttgggtcttcctgtttggcggcggcatggtaccaggtccgatgctagtcttgaagcttcggggagctgggatgccgctgatggttcgcttcttcactatgggggttggggtcgtagtcacggatgggcgttgaaactcctgggagatgtggggaactgttggcgtggcaatatcttggtcctcatcgataagagacatgccagcgatgttagggagttggccggcatgattgctaagagatgaccgaggccgccgggcttcggtcatagggtttgtcgagtagtgacccagtggcgttttggccccaggacgactcgaacaactttcgggccgggcatttacgtggacacccgagtgcacgctctggctgaaggagccgcggctagagaaactagttcggctgctcggacgactctcgcctgtccgtccgaatgactgatgacccggtggagggtaagatggggtgctttcactatctcgggctgaagaaccgaggctactgttactcagccgcttgcgagaattcctccgaacagtgatcgacgagggaacgatcggggtgtcgctgattacggatccggaacgaggggatccgcgagaggaagtgtcagatggggcgggaagtcgcgatttggctgattggacgcgctcttcgagcttctgcatcttaccaatcaggccacggatttggaacagtgagccagacttgggaagccccggtgggcgcgaagtgctcattctcgtcaaactgttgcgagacgaaatcgacatggagggagtgggccgactattggcattggcattggcattattaccattgctggtgctatatgcgccattgctgtaggcgagagacggggttcgcgaatgagtggtgcgcggttgagtccgagcgtgaagggttctagagttcaccggatccgcgccaccggctctctgtcgagggaatgttggcgtggagtttgcgtacgggttaatcgacttgcgaatgttcacagacgactcggagatagggggtgaaggtggggtagcggtagatgacgcaagggatgatttagcgggaggcgtggcaaatactggggaagatgtagcggtgccaggtgaacgatcaaagatctccacactctgtggagttgccgggctgcgatgatacaaaggagtgggcttgcggcgacgcaacccatgcccttcggtatttcgaagcttctcttggatgatctcggcttcaatcttcagatctgacagctcgtctcggagtcgttggttatcgatgcgcagctgctcccgctcttgctccccatttctcatttcctcctctagcaagaccccgcgctcaatgccgatgttgtatttggactccatgtcctccagggacgaggtggtgttccgggcttggcgctcatagtcatcattagcaacttcaatatctcgaagcttgagctgcaaagtgcggttcgcgtctcgaagtgtggtgatttctttctgaaggttgttctgcacagcgttgccttcggttttcgactgcttgtatttggtctgccagcgcaatgttagcacctgcacaattgtgagcaatgagcatgatcccttaccttccactcgtcgacttcatatcgcattgtgtcgagcttttccttcagttgccgctcccgcttttccgaagcttcaatgtccttctccatctcagcctccagctcccggctggaggactgaaagtccgcaagctccgcctccagttgttcatactgagctttgtaatgagccagttcatctctgtaagaactgctcgtatgcttccgttcggaagatggctcatcgacggccggcatcttcttgcgttgggcagaggaccggtcgcaaagaagacgtctggacgacgagtgtcgtccaaaattggcgaaagtcagtacagactgtacaccaggctgtcttgccctgcagatcgttccagcccctctcaaagactcataggttgtgtggtggcccgatgtcaacaaccgtgcgttttgataagagcccctcgccgaggcggtgacgcaagggattgattgcggtacctagtagtttgtccctctatagagggaggaagagaagatcgaaggatgtggcgaactaagatgtgcaaagctgggttaccttcgacccgcctcgtgtcgaaaagcgggttcgattagatcgggctgggagaaaccgatgttgttgttgcggtcgtcaggggccggtagatgcgctagtcctcatgtagcagatctgggctcagccacccaccgctcttttggtacgtcaaggcagaaacatattgcctcaggcatttaaggcactaacacgaagctaagcctcattggagctgaaagtgatcctgatcgacctcagccccgtgatctggactcagcagtcgccagtccccagtctttaggtctctagggcaatcaagtcggagaggtaagtagctttgtctatctttcaatatttgcactagaactctctgtggcccttcaagctccaagcacaagtgtttattgcctccagacactaccctggatgttatgcccacgcacgctgttcttaagatcgctgatcatcctgtttgcttccacgcacttgtttacccccgattattcgcaagctccatctatctatcccagtgttgaggcgcatcggctaaacgtgggatgatggtatgacatctgaacttacagtttccgccccttaagtagatcccgctcagtgaggctaaggtccagctcgatctatcaccatggcagactcaaccgatctcaaccttgacgatgcgcccagcgaccttcaagacatccccgaactagcaatgcaattagttccgcctccagaggggacataccctgacaagtaagatctcatcccgtcgccccttgcctagtgggaccaatatcaacactttatgtctacagggcctctcttctcgccgcagttcaggaccatggcaaggaacatggctacaatgtggttgtcaagtcttcaagcacgcccacggagaagaaacctggccgcaccgctaaggtgtggctgcgttgtgatcgtggcggccactatcggccacggaacggtctgactgaggaaacgcgcaagcgccgcagaacctcgcggttgatggattgtcctttcatgctagtcgcagccggttctcccggtatctggaccctgacagtgctaaatgcgacgcacaatcatggtcctattatcgagaagccgcggcaggtgcctcatcacaaggtccgcaagggccagctaccagccactccatatgattggccccatgatgcttcattcaccccatacaccactgcgcttgtgataattgacatgcaaaaggactgtgggtatttcggactattaccactatcagtgaaccaactggctgattttgtcctagtctgtttgcccgaaggatacatgggatatcagggttatgatatttctagcgcacaggctttgatccctcccttgcaaagattgcttcatgctttccgctctgggggtttcccagtctaccatactcgcgagggtacctagtgtctcgtgcttggcttttagtatgcttttactaattcatatcaggacaccgacccgatctatctactctctcaagtcgtgaggcatatcgatcccgtaacaatgcatccggcttgggtatcggttcccctggtcccatgggccgcctacttatccgtggcgaactgggccacgacactgttgacgaattgtatcctctacccggtgagccggtcatcgacaagcccggccgaggtgcctttgcacacaccgattttgagctcctccttcgcaacaaaggagtgaaaaacctcgtcattgcgggtgtgaccactgatgtctgcgtctcgacgaccatgcgcgaagctaacgaccgtggctttgattgtgtcgtcttagatgatggcactgcagccgccgaaccatcgctacatttgagcactatacaatcgatcaagatggaaggcggaatctttggaactgttgccaagttggaagacgtcattcacgctgttgataatttcaaaaccgtcaccatgaagaagctggctcctcagatgaccgtctaagtatgtactatttcttttagccggttggctatggacgctaggattggaagggatttctcgggcgtttgggactggagttatctcttttctgctgagatactgcagtgcgcatactcgttgcttttctttttcgaatcttttcttttgttgaattttagcgggccagggacttcattgatcccagatagcgtcatttcctgccagcaactttaggtgcaggacaatagccattgcacttctagttcagtttgtcgtgttaaatctaaaataacaagcacacttttgtttgtattacactacacgctagattattgaccttctccttgactgtagacttatttctctgttatgcagagcaagtcaaaataatgcaataggcacagagaaagagccaactcccaagagaatacatgccctaaaaacgccacgctcatgaacctagaactcccaagaaacagccaggctacagccattttttccctgcagcagtaatccgcgatctgaaaacaggactcttgatctccattccctgcttatagaatgggctcatcgccgtcttgacatagctctcgtatacctcgttcatgaactggcgcacagcctcttcggtctgcggggaggtcgggtttgcggcgatagagctggaggaggcgcgtgtggtcgatccagctgtgcctagcagtgaggaggagccaatgctgccgcttgtgctggttgaagaggggagatgcgggggttggtggaggaggaggaagcgcgcgccacttggagtgaggaaagccgtgatgtaggctgctgccggcgggtaggtgtcgatatgcttcaggtaccttttgtgataatgtcaggtttggaggtttgatgtgggatggagcgcgggctgagggtggtttcctctgtgtttacatgcccctcgtggattcgaaccagttcccagtagccatttgacatatgggatagcttgttagacttacattccaccattggtccattgcgcttcttccaatatgtccagacttgagtggatgatgaactggttcatgtactgcgctgtctccggaaagcggaagcgagcaatgccatcaccaccccccttcgatgtgccaaaggcgatgttgaacaaaggtgtgtcagtgggtgatagaatggtgaagtagtaggacattttgagcagattgggattattcagggttgacatcgacccaaacatggccgaggagctgaggattgcgggtttactagtggcccccatcacgtggtcgataagaaatgagctcgtccgggtgaaggatgtatacacttttgatgaaagttgaaagttgaagaatattgtaataatttgagttctgttcaactacatatgcagttcaaattcattcgcacggtctttaaaggatctttgggtgtgatcttgtttaaccaggattctcgttcattatatatctttgatcgttacctataactgaatttgatacgcgatttgtcgggcccattccagtccaattaagcaccgggcgtggcttgggacttaatatacaactttacctaggagatagtcaaaggaataaatcgaagtggccttttccgcttgacagatattagcataaaatatctatatcttcctgtctttggggcgaaagatttagccgcaaaccgtagaatacccgaggaacggggtaaagtcgatgaaatatccgcgatctgcgcttcaccagtgactatatatgtttatcaccacatgtacttgcccctgagagctagccagccaccaggcagcatccgctcgtagcttctttttggactcagatactccgacctccagaacaatcatgggccacctgtcatttcgacctggaggaagttgttcggggatccatgaaccatccggttctttggagcaaatgtttccttctacccttgcagttgtaagggaacatagcgttcttcccaaattcgcaaataatatagccctattgaattctgactggagctcacccacgatggcatcatgcggtctgcctggtatggtaacgatcatggcccgggtgtcggggttgtagagctggcggcatcccttggagagttttagatttgctacatctggtggtacattcgtgaacttggcgtatgctgtcaccagattcggggtacttcgcagacgagacagaatagaccgaatgctccgggctgatgatccgatcgcttccaccgcacattccacatcgaaacagtcaaagatcagttgtgtccatgatctttccgataagaggtgaagaaaaaatgatccatttcggtacgattcaaatcacactagccctggtaggtctcatggaagcttctggtaatcagtcaccaagtcctgcgtgagaaataaccagttagtcctatgagatggttattatgacatgcagttctccccgcaaaagccaccagcacgtgataaactgataactagccacggctttatcgcggccgatcacggtcgatcgcggtcgcaacctttgaccttggcaagcacttcctgccaaacataccagtttcgttgctatcaccccgggtacacaaagccctaaatctgcttgcaaaacttaagttccgatatgcccacaaatctcccctacggattgaaccttccgaacaaaagtctcgcggcgatgaaaccggggaatgctctcgcgcagaaaagaaagaacatttttgatgacgactctgaagatgaagaccagcaaactggcgatggtgcagttgaaatctcaacaattggaggactagaagagccagctacgaaaaagaaacctttgccaagcgcagggcctccgccgaaacgcaaaattcaattcggtagcggtcccaaaccaacagcaaaaccgctcagcaagaactcgctatttgcagacgatgaggatgaggacgaggaaaaaaaaaaagagcaacaaggcgcaatgaatcttggattgaaccaggcgaagtcgaacaagccaaccgctcctgtccagaaatacaccaatctcgcgtccatgcacagtagcaacatgcaggcaaaagcggcagaagaaatcgacccattgatctactcatacgatgaagtatacgacagtttgcacgccaaacccgccaaggcctcagtggaaacaaagagcgaaacacccaagtacatgcagaacttgctacagagtgcagagatccggaaacgagatcaactgcgggctaaggatcgccagctagccagggagcgtgaagctgaaggtgatgagttcgaggacaaggagaaatttgtcacctcggcctacaaggcgcagcaagtggaactgcggaaggcagaggaagaggaagcacgccgtgaaaaggaagaggaagaacaacgcaaaaaaagtggcggctctggtatgataggattctaccgggacgttctgtcgcgaggagaagcacggcacgaggagctcattaaggctgcggaagaaactgctcgccgcgtcaaagcaggcgagatcatcggggagacagaggatcaagaggtcaagacggatgcccagaaagcgcaggatctcaattctcatggaactcgagttgttctgaatgatgagggccaagttgtcgacaagcgtcagctgttgtctgcaggactcaacgtggcaccgaaaccgaaatctcaagcacctgccgccaaatcaggagcttcaagacctaccgctggacgaccaagtgccggtgctggttaccagggtggccgtggtgcccagcgggctcgacagaccgacatggtcgcaacccagtacgaggagcgtgcgcgacaagaagaagaggccgaggttgcaaagcaaaaggagatcgctgaaaagagtcgcagtcgcaagaccgagaaagatgtgtccagcgctaaagagcggtatctggcaagaaagagagaacgagaagaggctgctgccaaggaaaaatcgaagggggcttaagtgtatgcaaaaggcgggctggatgtgttgcatccatggaattttggaatatttaatattgcatagcgctgggggagaaacttgtacattactctcgtgataccaaaagagacccgactttgagccatagggctgtttgctatggacgaaccttgccgtagaatctagcttgggactataaatatgcttgcccctttccggacaaaatttttttttttcattcgcctcttgattttcattgctaacacttggtaagttctatcgccataactactctacactctcggaggaaccattgccaagacctcttaaccccggcttacattaccagcttacctcataactatcacatgaccccacacgggctgagttaatccggaccgaaagcactcgctaagccgccccacacaggtcgcactcccaattttgcactcccaaatcgagattcaagaatcgcttcatcaccaaaccacttccatctcccgtttatcaacgtcaatcatccaacatgggtaaggttcacggctctctcgcccgtgccggtaaggtcaaggctgccactcctaaggtgagttctcttcgatttccagccaacgacactcgatacacgatcgcagtggccatccatcccaccagcctttttaacgacgattttgcatccaggtcgagccccaggagaagaagaagaaccctaagggtcgcgcctacaagcgtattctttacacccgccgtttcgtcaacgttaccatgaccggtggcaagcgcaaggtacatatcgaatgactcaacccacacaaccaagcacaagacattctgcaaatatccacgaccacacaatacgaataccgtgaatggaggacagaaaggctgaccaggcgcaaaatgcagatgaaccccaaccccggccaatagattattcaagtcgttaaaacaatcacctgagccgcgatcggctagccgagttctacgatgaaaaccttcgcatgaccacggcacgaccacggcccaaacgaacgaaagcataccagatatggctggtacttgtacggatgatatcacgcttcttcgtcttcacttgaattttttttttgctggcaacggatgggtttttttggaggctgactcgcggaaatggatgaacacacatggtggtctgaggatggaaagctgtggctagatgtgagctgtctacgggcaatcctcgcagcctggacttcagagtcacttttcgactcatttcataggctgtcatgaattgcatttccgatccagaaatggactctacctctttttccatgcttttcgggttatctttacttgagacagtgtctaggggtatactgagagcttgcttttaatcagatgcctgcctctccagggccgatgttggaggtgtagaacaaatcaagtgggcccttcaatcgtggaacttgagcccctatgcagtttgtttcactgttcgttctgttggccaaccaacgacaatataaagcccacagtggctgtacaccgaagtatatatttgccgcaaacgtgtcagaactcactagtagtatataagtcaagttctcatcttgcctttgcaactttttgtcgcactatggggtcatgaaacgtgcgcgggctgatagaaattagtggagtcttaatttttactatagagaacgtcaaaagggcggagcacaaggatctagaattttatactatctacaagaatagtgggctcatgtctttgacaacgttggatttcgataatttgattcatttggcccaagacgaaatattagtcccaggtatgaaataacatcaatgcgagtgtcttattgaatgtcttcttggtgtctttctccccttttaggttataactagaagctaacctacagatcacgaaataattgcggtgaaaagctaaatttctatgcatcttgcgcatataatatgcatttgatatgacgagactggaaggaaatgttgggaaaagagggaaaacagataaaaacacactcagaaatcagaaaaattcagtttgagctgtttggatttcgtaggacagaacaaaaagccgtcactgaaaactatagaaggtagtttgtggtattgagaatataggcttagggtcttctgcaaggcacgcaggaacaatctcaaaggtccgatggtagtacctactaatgatagcggcatcctcatttagacctgggcttatgcctcggagctcgatgtcatgacataaatggcaggtgatcagacaaataggcatgacctcaccaaatcaatgccggatcatccggagatgatgacttcccaaacatgtttggtcgaatgattgaatattccacggatcgaaggacttctaaggtgtatttaaggttattggaggtaagatgactaaggtgatattggccagtcgctgactgcaatcctgaccaacacatccacttgagacaaatacaggacacaaagagcagatatccagacatgtctaatcgtcagacagtggagaaatgaatcgcttaagggccattgagttcaactggagtctctaccccacacattgccatgacatcgattgaactcaattccgagcccgtggccgattgggaaagattttacatattgtgatatggcaaggcacaaagcgatgaacgatgtcaagttagctaactgagtctacaggtattgaaccggaaattgcaaaataatgaagggttgctggctatccccatctcaactggagaatacaaaaacattagatacaaagagtgaatatctgcagtggacaccagctgttggaagatccacatattccaccttcttcctttggttaagcatcatcgacttctgatattatgctgtaccagatatcgatatccctattgctttttttggatcaagctgcgggccttggaatccaagcaaaggcatgggatggcccagctgaataccgagcaagctgttccctcatacgctcacttgtgcttggaacccactgctagatatgaacgccgtgtggatatcaccaaaataattccatgatgcaatgaagagaaggacggttgctaatattatttaggtccccccggggccctagttatagctcggtccattgttttatattccatttactattttcgaaagctgaacaaacacgactgaacgacaatacttgacttttatttttatttttactgtctacctattaataatttattgcaccaatttttgtcactcatcaacatgttcgccaaggccaagggaatcctcgataagagttcatccatccgtgatgaagttaacgaaggcaattaccatgccgccaaagacatcgtgaccaaaggtgaaaccaccaaagaatcgaccagccagggaaacaaggccaatgagatcgtcgataaaagctcatccgcccgcgatgaagtcaaccaaggcaattccaatggcgccaaggaagttctcacccaaggtcaaaacagcaaagaatcgtctggacggggagctgtcggcggggcatcaatcagtgctgctggaatgaacaatgaagaccttaacaaggggaatgttcaggagaccggaaagcaaggtaggaaaggacgggtcggccaagacaacaccggtacctctactggcgaaacgaaggtggagcaacgagacattggcagcgagaagcaagaagttggccaggaacagcatgtcagcatcattacaaatgaagatactggctctaaacagcatggtcacagagacaatgtggcggccggagagcttgaacccaatgacgacatccgcaagggcccaatcacgatgccgggaaccttccaagaaaaggacttccacaatgcgaacggtaaagaaactatcgttcagagaggaaccaccagcgaagaaataccagacaacttttcttatgattccgcgggagcaggaagccaaaaaatgactggattagccgtcgctggaggtgaatctcgcaaggaacctattgacaaagaggtccatgacaacgagaacatcagctcggacgtcctcaacgatgggaccactagcaaagacctcccaaagaaactcgtcgacgaaaatgttggaaaatatcatatcgacaaaaaacagcttgacaagcagggctctcagccttccgagaaagcagggacaagcgaagttgctgccaccgatgctgccggcggcggctatggtatgagcaagggagccgtcaaacagacctataccaccagaaagcagagcaagggacattccggctctagcaccaatgcagccacagcccaaggtcctatctccgcaagctcaaagagtaacgttgcttctaccgtgggagaacatggccgtgcaagcggaaaaggggcggccgcctcaaaccagacgaacagcgggggttatacttatgcccgtgcggtatcaaatcaaggcttaactccgaaaaccccgacaagcacaggaaattccaccaccaatgaatccaaccaaacaagtggtctacgttctaccaccacgagccaaacaaataatgccttctacaatgccggcgccactggatcgaacaaagcaggcatcgtcggtggaggagttctaggacttcaccaagaaggtaattatggtatatccggcaatgacaacagcggagtcaatcaaggaagcattgctgcaggaggagggactcgccaggggggtgtctataatacctccggcaatgacagtttcagcaatagagtcacccacgccagctccggtaccaagagcagagccggaaatggggtgtcttcgaagcgcattgttacacagctgagtggttgtggctacaaactcactattcttcaagaaaaagttcaggctgtgtctcagaagtgcaagactcagctgggcctgtttcccagtgagatcagcaaacgcagccccaacgtagatgctttctttgatgccgtggcagctgaacgtctccgatggatgcctcatgatggtagcagactcgactgcagccttagatgggcgtctagactggcgtatgccgtcgacgctcttcgggagtccgtcggagtctttgcgcctgctgccaatgaggcggcaacgctcatctggggattctctgtcctccttttggaggttagtcaagttgaccggtgatatttattttagatatggatgctgactattgtacagtcagacatggacaatacggatgtcttcgagagcgtctttggccgatatggccgggtcgccgtcggtatatatttgcttttgcagtacgagattgcatacaaatcctcgcctgaacttcagccatatgttgccgcggtattcgcagatttgcttgaaatggtcagtagcacggctatgagctgtgtcgagggatttaaaagcaaagagtccgatcagattattggacgcaacgttgatgccgcctttttgacctacgccaagcgcttttctacccactggaattgtgttgtcgatgcccacactgcaaagctcgtggaggacagtcccttgatttactcttcgcctgagctgggtagcttgcgtcaattcctgggagtacaggaccgccctcttcagttcatcctcgactctcgcgctcactcgcttgctgagggatcgtttgagtggttcaacaacatgctctacgatttcagtgtcggaagctcacctgttatgctaatttccggtggtcctggctcgggaaagagtgcattagcccaatgggcggtcgaaagactacaggagtcgggtgaacacgatagctggaatgtgatcccctacaccattcgtgagttttacccttagatttttgctgatttgctagctaatctaatacaggtgctgatattcctgtcgctactttacctctacgcatcctgaagggtgtccttcaccagatgttggatcattctgtcagtgacaagcagacccaagaggctatcctggttgaagtcgcaagggcagcccaaggggcgatcgatggcgctggagatgacgcggtagaagcaagcctttggaagggtattcatgctggtcttgctacaaacatccagtacatgtttgtggttgacggcatcgaccagatcaggggtggtcataccaatgccattgcctgtcttgatcgcttctgtgagattctctcagaacagaatgctggatctaagatgattgctttcacccggcccctgagctcaaagaccgactccaaaggaattcagcagttttccatgcagacctcacagactaagagcgacctcatagcctatgtcgacaagatgcttgcatctagcgccaactttgacacacacaagggcaaccagcttcatgccgctgtgtctgccattgtagcccgctctcagggctctttcagttgggctgaaatggcggttgcatatgctaaacagcaaaagaccttgagccaggcggttgcctccattcagggcctgccgcagtcgatgccggagcttattgatttccactccaagagtcttgaccttagccagcagggtactattagtgttgtttcttggctcgcggcagctgagagacccttgctagtcgaggagattgagcatttgctgaacgtggatcccaagggccccagatactcctccaatcagccctctagtagctatgacatcttgaatgctctaagcccgctggttatgacccgtgatggtgtggtctctttctctcacacctgcattcgcgatcacatcatcaatcaggctaagtcgtctggtggggagtcccagctcagcatcaaggatgcacactacgacttgctcaccaggtgcctttcctgcgtccagttgagcgtgcgtgaggaggttgatatttccatggataggctgggtatcgaggagcgcaaccatcttttcgacaagtatgtcgtcttggagtacaccgcacgatactggctgtcacatcttctctcttcgccaattgtcaccgatgacgaagagttccaatttaattcaagattcaaaaagctcatgcctgccaccgttctgttcgcgcgcctcgagctgacttgccgcgagtcccaattcactcggtctagcgtcgtggagctgtacagacttgcgagtgacattcgacgattggtccttggcgagaaatcgatcgccctgctacaaagcctgattctcagcgcacgcgtgtccaagatggcgcatgccagccacgccgatgagacctgctacaaagcgtggaagctaagccaggagctcctcggccagtcacacccgattacaatggcatgctctgagatgatgatacagtcattctccgaacaaggcacgattgcctctcagcaggaagacatcctgaagtccttgatcttgacagattcggagatcacaggggttgaattcaatcaacgcctgaagtaccttggaatgatcgtcagcatgtacaagactcacgacgacaaccaatccgcgttgttcatctcaaagcacttctatcagcaagttcttcagaagtatggtaccaattcgcaccagtcatccgagacagcagatttcttgaccagtcagttctcgacaactggaagcgacgaggtgagccgtgacattgctagaaccaagtatgacaatatggtgcgcactatggaggtcactgacgagcgccgaatctcctacactcttcacatggccaagatgtatgaggaccagggtgaattggctcttgctcaggcagttctttcaagcctgtgggcgggtctcaactcacgcgacattgactcggttgatatgatggacaaaaagtctaatgtcgcccttgtgtactaccagttccttcgtcgtcaaggtcgaagtgatgaatctgaggtcataatccgtgaattggttgcagatctcgaggttactggtattcactccgaggagatgatgcagcgtgtgcaccttctccgcgctgagactcgggagatgcttatgtacaatctcgatcgctccttgtcaattcttatgtggcgctactacaaggagacccaccaagagtactcagaggaatcaaccgctctagcgctctcaattgctcagagcatggcaaatgcagtctctattgaggatgcatcctctctgtcttctcgggaccgcaagctgctaattgagctgctggacgtcatctcggccagtcccgacaatatgactgtcactaccttgatcctgtgccacaaccttgccagtatctatgtcagtgagggagattggacccaagctagtgaatgctcaatggcggttctgcggcatatctggcccaccattgaacagtccaaatctcaccagaagttctcgccagagcttgcaccccccgcggcagatttggctttggtgttggcctactgtcacttccgcaggctacatttagaacatgctgcagttatttatgagaatgcggtcggttctttgatctcttctgccggagttcccgtggcgtcggtgctagcagttgccaaggctgccgtcgagttccacgaaactacctatcagttcaacaaggcgctgaatttgctccatactatcagcaactacttggcagctcgtctcggagagaagcatgagcataccatcaacaatatgtatctcgaggctgctttggcaactcgtctggagaagaactccgaggccaagagcatctaccagcgaatcttcaaggctacttcccatcaggtcacgattgttcccgagggtatcgccgctgcaattgctctcatcagcctctacgataaagagatgcagtgggattctgctttgcatgtttaccgagctctttggccgaccctggttgttgaagacaacaaggcagattcctatgaccatgcgctagtggaccggatgttggagaagacttatttgggctatatgtctattttgaccaataaaagctccaacttctctgagcggtatcgggtggcctctgagtatgtaatgacctgtcgccacttacacggcgcaacaagtgagaagacgctcaatgccactttactccttgccgagctgtgtgagtcgagcgatgcacatgttgatcaagccatttcgctttacaagttgcctctggaaaccagcgagtgggtggctccttctcagtcatcgaaggggctagaccagatgacttcgtcgctgcctatcaccctcaagcacaagttggcacagctgtttgtgcgcaagcatgattcgactatagaagcccgttccctctacactgaagagtttcagctggccaagaagaatcagggctacttttccaccacgactctctcctggctccgtgaacttgccctcgcccattcgcgacaaggaacttcctcttctgtccagcagggtaacgccattctccacgcatactccaccgatgttttgcatgccgacggtgacactgacacagtgggtgactgggcccgccggatcgcaagtatctacctcgagtgcggattcattgaaggcggtaacaatctccttgacgaactccgccaccgcgtggtgtacagcttggaatcttcttccgcggtggatttgagcgatcgtcgcgatgccgtatttgttgctgccttcgaggaagtctttggcagacgtgccagctacgaccaaatcatgtctgagatggctcgtgagatgaagacctctagggacttctctaagagtctgtctggtcacgatttcattcccactttgatcattggccacaagctctacagtctccaggttggccagaagcgagttcgcgctgccaacgacaccaaggacaagttgtacgactacttctgctccaacctgtctgccaccaaggtggccgacaaggagatcgtgcagcagttctatcagatctgcctgcgtgaggtccacagagaaaactatagcatgaaaatcctcacaacgaccactaatctcgttcgtgacttgtgcaactcctcccgcttccaggaagctaccatattgacaggcgttttgcactccttcctgcatctgaccgatggtctcaacaaccaagaaagtatcaacaccgctattcagctctgcctgtacctgggcggccacaaggcaaccaagtgtaccgacgaaaagacctaccaagccatgtccatcaagtccaagctgctgctgcaagagatcatggcatcctcaaaatccatgggtatcgagatggtcgacctacccttcaaccaactcaacgacattatcacccttctaggccagcacgagatgttcgatgagctggaagccattctcacccaactctggacctcacgaatcgtccagcgtacctggacaccggatgtggtcgtgtggatcggccgacgtctagtcgaaacccgcttctgccgcggcaacgtcgagtccgccatccagttgtgccgcgacatctgctacaacctgcgccaggtgtggggcagctgcgacccggttacactgaacatgaccaagcttctttcagccctgttcacagcctcagagaaccaccagtctgcagcgactctacacgaaggaattctgtacgatctgctcagcgactccgaagcagagggccatgccaatgttgctgataccgcatcgcaacacatggagctactgcgccgtgcccaggcacgtctgggaccagactcaaaatcgaaccgggcttcggcgcatgcggaactgtcccaatcagttgccgatcgctttggtgtgcagtctgagcagatcaagaatgttggcgatgctaatggcggtgagcaattcggtgtttggtcgaagccgagacggtttagtatcgatgttgatgatatggaggaggagggccagacgcatcacaatcatctgcgtgagtccagcggtgttgggttgagtggtagtggcactcagagacgtatctcggtgcaggctctctaagtacactgggggatattttttttttatatcagatatttgtatttcagttcatgctggcgtttttggatgtttaacctgtaccaaattgtatacctttgtccgtttcaacatcacgatttggtaaatcacttgtctaactagttatcggcttcaataatctgactcttttagctcatcatatgtgatcatacaaaggttacactacactacagatgtatagtattgggatggcttaaatcggggcaatttctacgtagagtgggctggctactttatgaactggaggaaagatatttctaagtctaatacatcatctgcacaaggtacatacaatacccaagagtaataggtaattatgcttccaccacatcggtgattcgacacgcatagcagtttggttgataagaaatattgccaaaatgtacactgaccctgccggtctgtgtaggaccacaccgtgatgatgttgaatgaatgtagtttaaacccgaaacccaatatgtgtgttcatgcacgctagcacaaggaaaacaaaggatcatatgcctagtgtatgatgcaaatgatcaccagagccgaagcctggtcaagcggtcaatgcaaagctgaggcccatcaaccccatgcctccgacagcgaacccgatacccattccgcggtgatgggtgagcccaagtccctcgctgaaaagttgcaacgcaaccgaagtcatgactccggcggtgacggcaaacatacctccatatataccccacgagggaccagtggcatcgtcgctaccgcgttgcccagtgctccagatccagagcgctgcgagtccagcaccggctggttgactgatacctcctaggagactagaccagaacattgctctccagcgggaattgagggctagatagagcggaagtgacatggcgaagccctccacaatgttgtggataactagagccagaaatactgtcataccgagggttgggctggcgtggtttgtggcgtaagtaatgaacccctctggaagcttatgtagagcaatggcgagtgaggtttgaagcccaatggaaaggaatgcatttttaggaacgtgatggtggtgggggttgccgccggcagatttgggacgcccagaatcaatatcgtccaggtagctatgagattcgtcatggtgatgatgctcagaatgcggacgagatcgatgacttaaatgtgggtctaaaatgggagacgaagtggacgatcggtgcatgtcatgctgtacagagatgttgtcaaaatctctcccttccggagtgggaggcacatgttcaatgtcgtcaattcctacgcgggaaatttccgattccagcggcacggatataccttcacaatgcagcaagtttggtcgcgcgctctcatcgctgttgggtggtggaagcactttgttgcattcgaggccacaggtttgagaaaccccgaagcaaggcccgtcctcgtcacaggcggattttacgccacccatgaacgacgtaatgcggcgcgctagcattgcccgcatcgtgtcgcggcgtctgggtgccggctcgatgtgttggctcgcttgtactaccgctggcgttgacttgaatgaagatggcttattatgttgcaacagcggtgttcgttcggtatgtccatttgtatcgttgtggacatggtcctcgtgtgcggcctcgccgcgctcggcatcattttctgactcgtcatgggtatgggcacagtcgacaacatgagatgggatgtaacgatgtgcgaacgcggatagtatttgaatgccggccactccagcaatgaaaagaccgatcaacatatatgcagatacagcgggagagaagccggcgcgggtaaggtactgcttggatgtgggaagcatgctgtagagggaggtaaagagctgcctaggattaatatagttcactattcctccagaataatgcttaccatgactccagcactgagacataatgatgccgacaggaaatgactactgttggcgatctggaagctcttgcggcgggagaccacttgaaccagcacatcgacgcagatgatagaggaaccaaggacgcatgctgaagatagttagtggctaatatttcaaagactccaggcgacacttaccgacgcctgagacggtgctcatcacccatccccgaaggtcgttggcagacatggcgtggggagttgaagaaaacggaaacggtgatgtaattagcaatcagcgtggttggcggtcaagactttgcctctcttcctcactctagaggaatgaaaatatgacgatattcatgatgggcatttatgttaatcacttgcgttgtctgaggacagtgcattccgtccccaaggttctcactgcacctctgcaagcccccctcatggctgggatctgcgatatcgaacaaacgatctggcatcgtgaacgtccagtttgagagtccctaggactatgggatatggaggaatatttcctatctgagggtcatagatactgcctttcattgcaatctgtcctgtgatacttgacactttctcatatgaaggtgcacacctggacatatgcaggggattatgcaactgacagtatctggtgatttgaaataactttagactcaccggactcaagagaatgacaagtatcacgagaggcaagagaacccagagaacccaggaaatccagagaatatatatacgacatctcccatgccttggaaatgacaatagttccgggccccatgtgatgtgattggcccgtgactccccatcttttttgctgtcttcgtgtttcggctctctcgacgctctagcctctcagctctacctaggtaaatccaaggggcactcagccatgtccaaagcaaccctggccgtcatcgctgccgccagcgcagctaccggagctggtgtcaccgcgctgctcttctccggcaaatcctcgaagccccaacaacaagagaccctctctccgacaccgacaaacccgggcctcaaggtaccctcaaccatccaggccccagccctggcatccaagcgagccatcggccccgtcgacccagcaggaatcctccagtatggtttcccgggcccaatcgccgacgagctctcttccctcccattgcacggcgcctacgaccgacgcacacgcaacccatcttgggtcgcggaacacatcacgccagaatccctagggattaacaacgccgacagaaagaagagtaccttcttcgaggacacgaccatcccggggatgttccgcgctaagctgtccgactatttccgctcgggctatgaccgtggacaccaggtgccggccgcagacgcgaagtggtcacaggaggcaatggacggcacgttcgcactgagcaatatgtgtccgcaggtcggcgagggcttcaaccgcgactactgggcgcattttgagactttctgccgtgatctcgccaagcgttatccctctgttcgcatcgttactggccccctgtacctgcctcaccgtgacccggatggaaagtggcgcgttaactacgaggttatcggcaacccgcctaacgtcgctgtgcccacacacttctataaggttatctatgccgaggatggcaccaactcgcccacgagcaaggttgcactcggtgcttttgtcctgcctaatgctcgcattgcaaatgataagcgtctgactgactttgaggttcctctcgaggctgttgagcgtgcttccggtttggagttcggctctaagttggacctcagtcgtcgtcgccgcttgtgtcaagaggtggcttgctcgatcactgtgcgcgagttcaacaatgctaagaagcgctcttgagcttgatgtcacagaaatgtgaggagagagaccaggcttgccttttgacttctcgtatggcttcactgtattctagaaacattgtatttgcataattcgggcgttaataaccgctccgggcggcaatataaggatctttctttatcgtacacataatggaaacctgtgatgtttcatgtttctttctcgcttccttttattacgaagttgttcagcactggaacgcaaccccggtcttcttccccatgctcccacctttgctagcaaacccagtcccctcggaggagatctccaccagaccaggctgaatagcatccctatcctttttcttagacttcttgttattcccattcccgtgatctggttgtgacttcgccgtaagatctgtctcacagacgaaacataaaacctgaccatggagagctgcagtcttctcctgctcctctttcgaggcatgtggatcagggatgtggtgttcgtggggggtcatgaatttcgttacacacggagagcaaatgacatgcccgcagggctttgtgactgtcatgagacataattagcaaaacccaatggctgtaccaacttctactccacatacgcatcgctttgagcccattgcttaaatttttcgtgcaactcggacacaccctagacacagtcccatcggaagccttctcctccgtgaaattaacctcaacaagcgacttgagcgagtagctatgtcggctctcatccgtcgagccaggacagacaggcgtcaacttgacggtcttgttggcggcgatttcattcgcatcagtgttgggtgttaaagatggaacccagaaagacgggagagcagatttgctagccgactagagcaaatttgttagttcaaaacaaatctccaatcgaagaccgaggcttcaagcttcaagctccagcccaaagaatgaccacaaaccttctccatcttcaactccatcctcaacctctccttctcctccccagcaacacgagccatctcctcctccccgagctcaaaaaccctcttcctcttcccatcaacctcaacctccctagccttgaacttctccaaagcctcagactcctccgccttgcgcttcttcccacctttattctctaaacccatggaaacaagctcgaaatccctgagatctctctccttcatctccgccagcgagcgctcctcatcctctgcgatgcgttttctcgcctcgtcgcgctctttttcaagccgcttgatctcctgccgttgagagaggaggtcgttgatcgcacattcgcggcagaagaggtcgccgttactggcgcatgcgactacaggcgcccgcgcgggttgcagacatagacggcaggagccaaagcttaggaagctgtcgcggccgattgcgctgcgttttgtgccccaggttgagcgtagaagaccgcgttcgtaggaggtaaagtgtgggagggaggtgtttcgctttgaatgcgccattttgagtgtggatcgcgtggacgttgatcgggggtgagggtggctttttgtagcttcttggatggcgtaatacgcttttactcggggttcggcggcggtggggcttgggattggtgtgttggttcaccgctcagcttaccgctctcatcagccctatgcaacatcgtcggactccactacattgtgtatctaagcttgcacagacactgttgaaagcaaaatatcaaataatcattgtcaatcgtaattcgcttttgtctatcggtgattccacagcctcactcgaaagaagcatgattgaaatgaaatagccaagccatgagatatcaaagcacgcccatgaatgcagcctgccatacagatctgattcaacgatctgacagtaaatgaaaaattcccagaagcctaaacgtagacgcggacgcagaaatatgctcaaaaaccagaccgaaccgaaagcctgccacgaaaccgagattcaccatatgttaatgcaaggacagtaaggaaagtcaattaggaaaaggcaaagtgagatgcatgagtttgaaaaggggtataataatcgtcaagcagaagatcaagatgagaatggtcaggatatacagaagaaaggagaaaaagataggaggcgtagagtcaggcgcctacggcctgctcgcgtatgttttcgctggacgggctatcaacgattcgctcattgatagatgtagaggagggggagggggagggggagccgtcatgtcttggtgcggaaagatggccgtatattgtggatgaaggagagcaatgagtatgttcggtgtctaggggatctggggtcgggaacgaggtgatcaccggggaagccgggctcccaaagtcctcttccggttgctcttccggttgctcttcatgcgcatccttgaactccgccagatcgtcgctggtacgcccacttaggccagtggcgttgctcgtcctgcgcgccgaatgacgttcggggctgcggtcggtcataatcgactcgccgtccaatatagcaggatccgacgcccgtggctcttcatgaggggtgggcttgcggagcttgaggcgctcctccgggggcatgttttgccattcagacccgaatgtgacgacggatgctttcttgccatgcacggtgaaactaggggctttgcgaggaaggacttctccatcgccggacaattgatcgtcctcctcctgtccaatgctagacactgaaccccgtttcttcttcgaatgagaatggtttctatgagcatgcgaatcacggagggtgcgatgaaggctgcgacggacacgactcggtcgatcgctcttgtcgtgtggatgtgtctcgccctcggtgtctttaccgggaagtgcgtcaggggcgatctcttcattcttatgtgccgacggggacgccggcagctccagaagaccagcttctcttagaacacgctcctcgccgtcatcaaagcccacaggggatgtcagtttcgatgtacgagaagccagactagctccatcccaccggctggcacggctgaggagcgaggcttcacgctcgagtttaatggtcgatggatcgggggagtatgacttggcacgttcgggtacagccacagcagagcgccgacgcccgacacgggcaatgtcagctgaagtggcagatcctgggatactgggacgacgcagttcgtcattcgaaggtttagccagcagtccagcctccgagggctgctcggtttgtgccacatgaggctcggggacatcggcgctagagacgttttgcacaatactaccggctctttccacgctaggctcagatgtcacggacggcccggaaggagaggccaggcgtgctccgtccgactgggattgcgtcggttcagagaccgacccgaccctactttcctctgtctcttcatcctctcctaagtctcgcagaagaacctggcggtaacatttgctacgccagatatcctgtctcacccatttgatcttggcagacaggcggcctgcagccatgatgacgccctcacgggcccgagcgtgaagaggagtgagcacttgcaagtgtcgggcattttgtaaaagatcatccagttgcttttgtgacacggcgagcttttcgtttctttcccggattttttggctcatcaattggcgccgcgcagcaacaaattcggcaacaatgtcagtatcgatgctaggagaagggggctctatgtccgtcgactgttgagacttttgtgaagatatcgagcgtaatcgctgactcttgcggtatcgctgcccctcataattcgtggcgatcatgcccgtggtgcgcacaccagtggtcctgaaggctgccgcatagttgaggtgtgcaagccagtcattcatctcaggctcagagctggcaaggaatatctcctccaacgcgttgtgtcgaacaaagataaaggcatgcttatgctttttataacttgagtctaggagggcaactgtgtcaccagtagacacaatgttgtccggcttgaattcagcaaggggcgggttgaagacaagagtcccttgacggccattcttaacatatgcctcctgctgtgccatgagtgagcgcacccagttcacattgcggaagaagtagagctgagagaaggtgagaatgaccccccattcctgccagggcgacctggcctttttcttctttgggtgtttccgccaaagcaagccgaccttggcgactttgatatctaccagaccgggatttgagtcgcgtgggctatctaagctagccggcatgaacgcgtcaggacgagagcgcagagaaataatctgcaagattccagacttggtgaaggcctggtgaagagcatctatgtcgggtgggccagcggttccaaaatgattgtatgtatcatccagatccatgacatccttcaagctgggccgcagagatcctaatttaccttccaggataagtgagtaggggtcgacaggttcccgtgcaatgcgggccaaattttcggagctagtggttttgaacagagtgcgacgtggtttcgccaagtgtcgatcagggagattggcgtcttcgacgcgaatgaacggagtgtatgagatattctcatagaaacactcaagaatatcgtctgatattccttcactgcgacttatcttgacataatccgccttctgcatcttccgtttgttgttcttattgaagacatccgtgtgaagaatcaaaagcgagaatgcaataaagtatgcgttatccggggatgtgaagatgccaggattacattcgtgatagcgatcagcaaaggcttgcacgaaacgatcaatctgctgtgtttctttcggaagctcgacttccatcaaaagtttgcggattgccatgtcgagtgggtcaccgaagtatgagaaggttctcatatgttttcggagacacaccttgtagaattcctcgtctgattgagcgaggacacccgcaatcatgccccggggcagagtttcttctaaacgtgtcagatatgaagcgggtgtgtcgttttcttcccgttttgggattgctagctcttgctttacgggggtggaggcaccacctatcgtgggcgaaccatgatgaggagaaggtggtgatgagttttgcctcaatcgctgcgtgatattaaagatgtcaccgaaactcttgcggccactggtcgaagtggacgtgcgcgccgaagatgccaaatatggaggtatggacaagtcgtcttggttctcggccagcgatcccatggtagacgaacgtccccggttcttaaaagaggggttagaccgaactgagcgagcggaattcgtcgaatcatttcgaaatagcggtggtacatttgaggaggcaacgaatcccacggtggaacgagctggcgaaggtagtggtgaaacttggtcctggccatctgaaggctcggattttggggtatctgctggggggaactttggtcgaccatccacacctccggccggctgcgagactttggggggtaaaggaaagagaggagtccgggatcgtgtcaagcgtggcatacggaatcgctttgcggtagtgacgggttgaacatcacgaggggaaatgcttggggtgactgtctggtcaccgtagctctggtctgatcgagacgattcggaaaaccggggatcgatcaccgacgagcgctgggagtcgttgggctgtgtggtcccgccccgtgagttggttgacaagcgccctggctcttctgtaatgctctgggacatggcaagcgtcgagtcggtaacctgggagtcggttgatccttgacctcttctacgaggcttcgcaggttgttccattgatttccgagacatttcctccatggactgttttcttgacgacggtcgaaagctgagcttgggtctctgtttcaccggttggtcgagctcgtgactagtcggggcggtagtgataattttaggagctttattcggtagacatagttaatcaattgatcctgatgagcattgagttgtgcatgttttcactcacgaggtagggaagggaccgggggagtttcctcgcccgctttggcgtaagacttggagagctgggggtcagaagcatggcgtagtctcatgaagctgaatcgcttgtggcgtaagttgggacggtcccccgaggatggtcctgcaaagtccgactgagatacctcatgggttgacccgttctcgtccggtacctgcagtcctggatctacttcttctgacaagccgggcgagcgaggaattgactcggatagtctaggttcggcgggggggtagggacgaggaaggtgttcactgcgacgggataggccttgaggatccatggtgctctgcctcttgccatcggccacaagacgcagtcctttccaatgcatggtgaagggcagagcgtgaggacaaacccaagctaataatccatggaatgtaatatgttagatggggaattgaaatagaaacggaggacattgcccaggtggatccagacgcggtggaggtccctcgcaaaaaggggaatgccggaaagggaaacgttctagatttcttgtttctgcccgccacgcgtattttccttttccttttcctttttttggatcttcgcacaaaaatagatagaatcaaaaattagaagaagagagagaaaaaaaatagaggggcaaggcagacgagttagaatctaggcctgagcgtcgggtaattgaccgggtttaagtatagagatggacggcgtagaagatagaaggttgccgttgacgtttattcagggttgttagcttctatttaaatcgtacagatcagatagattaaaggatctttaattagtagtcgaatcattctattcctatggggtatagttggagtacattaggtactaataccaagtcctgctatcactaaaagtgccactgacgtagaacacaaatatcgcgaggcctttcttctttttctccggatgtctatgggccagagaatttcttgctttgcattctattccaactgcttttgatgcattgaacttggactatatctgccatcgttatctcccccaacgctttttccccgccctcttctctcttctccgcatccaggctctcacagatatccctgtgaacctcaggtctgacttgggaccaccaactccccttcctccactggttcttgcgactcggcatgcgtcttttatctcccatattggtcgcgtcgaccttgcttcctcttatctccgctgtccccgctggttcaagcatcaccccaccgccacccctgctgccttcccacctcactcaatccaacccacgcccatgggctcgactccgtgactgggtaattggctcaatatgggatattgatcacaaacggtgcccttcaaaatactcgtcaccaccgtcagatattcacgatcggtatggcagtgatgtcgtcctccgctttcatctgcgccagccagacgaggcagaagcattggctgccgcctcgcaggtgctgttcttggatatttgggcaataacctccaagttcgtagatattagacttgcagatgatatggtgaacttttcttctgaccgatttatgattgtttcgctaattattttgttagatcccttccttgttggacatactacctttaacactccgcacctcctacactcccctcatcgacaacctcgccgacgagatatacgcctcttacccctcccgtcaccgtaccgactcagacttcagttcaggaattgcatcgggtgaactgaagacgatatcgaacggcgacctattcttccaagaataccagccgctctccgtcattacgcagtggatgcgcttgatggcatcgatgttctcctcgcacgtacgtatgactagcgtgggactcagctacgagggtcgcgatattccagcattgcgactcggcgcttctcccgacacagaagccacatcgggccctcgcaaaacaatcgttatcgtcggcggttctcacgccagggaatggatcagtacctccacggtaacatatgtcgcatacagcctcatcactcattacggctattcacccgcggtaacacggctgctacacgagtacgactggatattaatcccaaccctcaatcccgacggatacgtgtattcatgggagtcagaccgtctatggcgtaagaaccgccagccaacggggcttccactgtgccctggcgttgatctagaccgcgcctgggactatgagtgggacggcgagtcgactcgctcgaacccatgttcagaaaactacgccggagcggagcctttcgaagcacttgaatctcaccgcttggcgcagtgggctcagaacgagacggcgcatggccgtgctgagatcgtaggcttcgtcgacttacactcctactcccagcagattctatacccttactcgtactcctgctcatccgtgccccccaccctcgagactctcgaggagctagcgttgggtctagccaaggcaatccgccagacctcccatgaatcatatgacgttacttcagcgtgcgagggaattctcagtcaaggtacggctgttgggattacctcgggtggcagcgcattggattggttctaccataagctgcacgccacgttctcgtaccagatcaaactccgcgaccgtggtagttacggattccttttgccttcggagcacattgttccaacgggcaaggagatattccatgctatgttgacattcggcaagtttctccgaggcgacgaagcgtcggatatcagctttgaggacttgatggcggatcaaatacctataggcgacagcctgtaaggttttttttcttttgatgattgcatgttgactttacgagcggatcttccccttcaacctctgtacttctggtgttgcagagtctttgtacagtatgtaggctatttgagcctaagaatgtaaagaattcgaaacattcctcaatgtaccggtaggcttggatgtgacatgattctaagaaaacaaccactgtatccgaacttccatactaagcaaggtttcaaggatttatgtatcctatcaataagcaggaatcttacgggagcttccaaatgaaaaagaatatatagtttttcgttgctatcctcacagaatatgcgcccagagttacgactaaagtggactagttccagctaagaaaaatcttggcctaaaaaaggtgctcgcggtcataggtcacttttttttactagaggatgctagccctctatattaattcgtacatacatatcaatatactattgatggctacgtttcttgaaccaagggtaaaaggataatagaccgaaaattatctctcataatcaaaatatatgaaggtaaagcaagatattaaaggtctgtcgatgtggaagatgacgggacaaatcgtgctcaagtcccacagcaacaagatatgtgggtaggacgcgcatcagaaaagccaagacacgaatttcttatagaaccagcttgcgtcgttgttcctctctgcctcggcctccttcgcggcgagatacaacgcctcttcgcgatcaatctcgtctttgccagtaaagagatcggctgtcatggggtcaacacctttggagccggtcgcgaacttgtatccgaagatcataatgaggtatagagggataccgaggtaggcggtaatgaagttcttgtaatcgaagtctccatatgttttggggttgtggatgaagacgtcgaagttcttagtgaaagcgatgaggatgcagaatcccagagcaaagtatgagcctgcgatgcccaagggcgccttgtaggccaaactttcctcggggatgccctgggctttgcgtgcacgcacgaagtagatgtgagtgaccaggatggagatccatgtgaggagaccgaagatggtgacaaggttcacgaagtacttgaacacagtcctggagtcgctgctaacgttcatgtagcccagcaaggcaatcacagatgagatagccagtgcaggcacggggacgccacggcggtcggtgcgggcgaagatcttgggggccttgccttcgcgggccaggccatagatcgtacgggtggcgatgtacaaatccgagttggctgctgagaagacaaagagaagaatacaagcgttcaggatgtggggcaggattgggatggcggccagctcgatggcgaccacaaaaggtgaagctgcagctgagccctttgccttgttatcgtctgaaagggcgaagaggaggctcggggagttgtacggaactagtgtgccgacgagaagcacactcgtcacgtagaacaccaggattcggtagaaggtcaatttgatcgcgcgagggatcgtcttgcgggggttttgtgcctctcctaccgtcactccgactagctcagtaccgaggtaggcgaatgtagcggacaccatcgtggaccagaaagccaagaatcgaccaggtgctccatccatcttataggtgttgaaagcacccgggctcttccagtagcggaagcccttacggtcatggtccggtccaccaccaagcatgagaataaaggataggaggatgatgccgaggataacaatgaccttgaatgaggacagccagaactcaaattcaccgaagaatttcacaccgaaataattgatggcaacgacaattaccaggaagatggtgatccatactccagcgttcacctgctctgtgggtatccagaatgatataaccaatgcaccggcagtcatttgatttggtgatagaatgatatatttgaaccagtatctagattcgggtttcgtgttagcgagattaatttttataggaatgagtagtacatacgtccaaccgagggtgaagccaagcgcagggtcaacaaatcggacagcgtaaccagtgaaaccagagggcaatggcagccaagccgccatctccccaagagcacacatgaccaggaaaacgatgaaaccaacccaagcataagaaatgagaattgcaccgggctattcaagtcagcaagaaggttcgggggtcaatttcggtttcaacactcacgccagccctgtacgacatctggttagccttggatctcagaacaaaatgggtagggaaaacaatcacttactttgcaagagcttcaccggttccgatgatcaagcccgtaccaatagcaccaccgatggctgtttactgtcaacgaatgctcgtgtccgactcagaacgacacccaccaatcatagtaatatgtctcgccttaagcgcacgatgcagctcaacatggttggggtcgttcaggccactttgaccaccttgctcaatcttgatatcctcactgatctcccttgtgagggtattgtccggatattcatcgactttggtagacttctccattgtggattcgacgcgcagaggtttgcgctgacgaggaaaaatgcccgggtaagaggtaagagtaatcccagatgtaagaccaggaagacagggggggaggaggaattaaatggaaagccaagagtagaaagtacacagccctggagaaagataagcaagagtaaaaagcaagttactgcttagttagtgacaggaaacacaaataataagatacgagacccgagaagacctcgggattaagatagccaagggtttttgtggctttacggggtaagatattaatttacccaaacacctcatatcacctgcacagttcattccggtgatctgatagtttggccattttcgggttccggggagtactggcacaatacggctgtgcgcatgacgtagcgctgtgctgttgatctagtatatgtatagattacttcccctgtatcgaatatgtcttccgtcagtaaactccgtatactataccagatattgttccaaaaggaacacccgggcaaagcggagaccttggcgtcaagacgggatactataggctctgcgggggcgcgctttgcggcggcattcgtcggaaatttttaggttgccccattccccccgttcccccgggttttgatatgaagcttcttgtttacacttagtattcaatataagtatgagaataacacatgttcaactgtatttacagagttgatgtcgatccaaaagcaaagagagtaagctccctcgaggccagacccggccatatttttgactcagccacccgattgatagcctcattttacgacaagggcccttatcaagcgcaaacccgaacggactgtacagccatccattgccaaggcggaattccattttcgtccatgaaaactaaactcgacctgggtgagatgcacgttcttgagcctgggcatctgcgccaaggccatttgcgtatggttcagccaatccttatctctcttggccagtgccccgtggcccggtcttaaatttatggcgggattttttggtgaaggtagatgcggaatatttctagaaagattctggattgtggcgggggcctggtggaataatttacccggtggctttggcgtcgaggctgcgcaacacaaagcaaatatgagggggtggggtgccacagcatggagttttctaaccctatctacaaaggatatctcgtacaacatacataatccatagtttcgctggatatgtccatcttcttggcttcttcgattctttgttcggggtatgtgtcaacaaattgtaatactgcttatctcgtgcttgttcctgctgtaacagtggagatgcccagcctagatagcaaatgtttcaatcccgtcacctttttatactttctcatgtaccagtaaatgctcaaatgcgcatcgctctgagacaaggtctgacagaggagagaaacaccaaggctagtatcgaagttggaacggtgttaggaagaaagcctgggacagctccccttgctggatttctggcatcgcaatgtgaacaaatcgaagaatataggaaattggcgagtcatcgttgatggatgtctgaagtccacataagacattctcgctttctggtgtggatttggctgtgacgagcattctcttgatctcacgaggccttgaagatacatggctggtctttcagctcagtgagcaatccaaaggaccaaggttttgggacaaatggtcatagagatggtgtcccaagtctgcaatgtgaggtcccagagatacaggatcttaagtaaaaagccatgacgtggaagtaaaccgtatagggatgtggttgatagcctagacgaagaaagaatacaaaggtattcagattccagaattgaacgaatagtaagagtgtaaaaaatgttgagcggtgtgatacattagctagtataaaatgggaaactgacaatatataatcgagtcggggcctacccagggatccagataatgcgaaagatttcagtaaacagaaaatcgcgcttgctaatattccatccggggtaatcaagcaaatcaagctcaattcaggtaatggtgattgatctagagcatgcatagctgacgtggaagacgatggcccataactagccaacacatccacagcccaatcatgcaatagtcgaggtcacaccgacccaggaaaggaggctctttgtggcaatcgggcaggattcagcctcatgaaaatacccgaagacaggaagctaccggttagatcggttatccattcgtccagaatcaagaatcacagatgtaggttgcaacccacagcgcttcaatgcattactagtgacgtggctttggagaagcggaattttgtttcctcgtaaagaaccacatttgagggggtgtgtggccaatatgcaggtctagcctagttgggttgagggaagaataccacgcacatgtgaaattcagccgctttgttccctagtaggagtgaccttggagcggttggacttgaccgagtggattgctcgtattttttcaactacaacgtaggtggcaccaccgaataatggcgacccctgtggttagacagggtacagttcatgctgtacgatgtgattgaggagaactgagccagtcaatatctcatcatatccgctgttacttcaaaactactgcaagccaccgtttaccaaagtccctgcaaacacgcctgaagctagcagctggggatattctcagcctgtcgatcaaaggcaacgttaccaacagcctgggtgttgggaatgtgatcaagtcattccggtgggggccatttggtctgcaaatctaattccttgaaagtgtgctgtggcgtgcataagtccgttagggcagtggtcgttcattgggtggtgaacgcctcagcggttacagatatttatatttttttatcgtgctgatcggacgattttgattcgtcgaaggaaagtggaatttactatcattagaaatactgaatagtagttaatttgacggttttccatgttaagacttgaagagatgcggggggaattgattccttctcctgagctggtccctatatcagggtctggcagccgagcatctggattcttcaacttccagatcttcaaccaaagaaagttcttaaattccttgtcaatcacatcatgggtgccatgcgtctcccccgcccaatgggcatctatgtccccagttcaccaagaaccctcaccggcgacatgatctctccaccactctctccagaattcagcttcgattccgagactgtcacaccctctctaatcccagctctggaatacatctctgccaaactacaacaaagaatgatgcacgtcaccctcctcatcggccgcggaaagccctacccgaccggtcaagcctccgacttgatgatcatcccaatccattcaatcgagccacaagcatggcgagtacttgaacgcgccattgccaaaggctcgaggaagttctcactcggccctagctggaccgacgccctcagccgcagccagtatgagcgccaggctaacgatcacctcgtcaagcaatccattctgcagaacgaagtcatcttcagtcaggagggcctaactctcctaaacatggaccgcatctataccttcaagcgccgtatgtgcattctctctactcgaccgttctcctgcaacggcggacagtcaatgtcatcctgcgttcggctactccaccgcatcgtcgcagatttcgccggtcgccccttcagcaaggctttcttctaccgcgtctatgagcagctcgatgtcccagacgagcagctcactgccgtcgcagttgcttataaaaacgtccacaaccaagatgcaatcattcttcccgtccaggcaaaagctcctgctcctgcccttactactgcttctactgctcctagtactgctgctgctcttgtttctgttccggttcctgcttctgtttctgctccagttcaggccaaagtcgaggccactattccagcgaaagttacagcgaaggtccagcccaaagtgcaggcagaagttcaagcaaaagctcagctaaaagctgccgagcgagtcatcttgaaacccaagaccgaccctatccctatccgggtaagagccgaacgtccccgtgaagtcaaaagatcgcccatccagactgtgcgcggtcggagacagcctccatcgtcgaggatgcgagggcacaataagcgtggacctaagacgcctctttctgcgtcggatgttactcccatcacgcggaatgagtggaatattcttgtcagccaggatattcgtgtgcagcctaaggttacacagtggactccgtcgccgaatgtcttggccgctgcttgaaccggatttccagttctgttggtgcacagaacaattcgctgttagatccatgataaaccgccagaccgttgggtctcactcacggctcacatgccatcccccaggcgtattggggcttgcttgaggtggaatatagatacatatacgagaaccaaatctagcccatggtgctgggtcatctctgtgtcttccccatacctgattccaccgatactggacctttataggccattttggtggaggacagattggccagtcttgacataccgggcacaaaaacgagttcaggactggcgctgaaaattgctcggtaccctacgatgatatgataatgatttcgaacattttcaaacgcttttaatgacggattggagtcttgaatattgaaaatcaattcacagtgtacggagtatatagttctctttttggaagacatacaaaacttttaatgaaatcgggcaatatcccaaatacatattcaagtagaattatgaccatccaagaatctcaaaaataatcaaatcatacaccttattagatgctgtgatgaatcggcatcctccgggctagtttgtcgagcagccagcatggccccgcttaagctcggcgaccggcgaactgagacagctacccacccaatcacaggcacgggaaaagatttacagtggatgtcaaacaccaaaattcaagtattgaagctattagcacatgggaatgcaagctgtgaataatccaagacatttcctatcggcggaactcgccgctattgtactatagcacacaacactgttggcgttttggatgggattgtagacattcatactgaaatcctgagcactccgggattcgcgcagatcttgcagaatcctacatgtacacatacacgaaggggaggttgtctgaaagatgtcggcttggcggaatcgggcttggcggggttatctaaagtttaagcgcgggcatatagccctggaggaacccctcttcggtgtttccaacgtcaattgaagcttttggatatctctccaagagacattgtagacatcgtgacagaaatttagtctgatatccaccatgtcggaattcaatgagcccgcagatacagactcacgcagtctagacagcgaccgcaaatggagtctgcagcctcttcttcgaagtgccgagcgctcgcatagcaaaatgccgggcattaggaagattcctcttcccgccattggaattattgcatttattgcgttgttgaatatcatagtctggattgcggcagctattgtgctggtaagttcgaataggttgtttgacattggatggatttgctaatgctttctagagttaccatccgtgagtcttcattactggatgtcccatagctcaaatctcatttcatttactaattgagcggaatacagttcgctggtttctacagctgccctagcctattcgcttggattaagacatgcattcgatgcagaccacatatcggtatgtcgaagtcggcctggaaatagaccgaatgattaacagtgagatctataggctatcgatttgatgaccagaagactcctggcaacaggacaaaagcccgttaccgtgggcacgttcttctcgcttggtcactcaacgtgagtacagtcacctcattctatatcaaatcaaacctgacccagtctagcatcgtgattatcacatcagttgtcgtcgcagccacagcagcagctgtctccgaccgcttcgacggcttcagcacggtcggtggaatcattggcacctccgtcagcgctgccttcctgatcctgcttggtcttatgaatgcgtatatcctgtataaactcgtgaagcagatgcaaaaggtcttcggtctccccgagggccatgaagatgaagcgtggaagatcgagggtggtggaatccttttctcggttttgaagaaaatgttcaagctgattgatcggtatgttttttggtcaagctgttgatgctccgcattatctgacaaatgtgtctattttttgtctagtccgtggaagatgtatcccctcgggattcttttcggtcttggcttcgacacctcctccgagatcgctctacttggaatctcatccatcgaagccgcgaagggaacatccttctgggtgattctcattctaccggctttattcacaggtcagtaccctcacatgcaagctcatcaatcccctgcttcagctctaaccaatgtctcccagccggtatgtgtcttctcgacacaattgacggagccttgatgttcgccctctacatccaaccagcgaccaacttcctccctcaaaagccaacaagcactgtctcagacacctcatcaatagctaccgatccagaccagctcccgcaatcacataacaaccaccgcgacccagtcgcattcctgtactactcaatcgtgctaaccacactcactgtcatcgtggcgattgtgattggcgtgatccagctgctcagtctcatcttgaatgttacagacgccaaaggcaaattctgggacggcgtccaggtcgctggtgactactatgatgctattggcggtggtatctgcggttgctttattgtctttggtctgttgagcgttctagtttataaaccatggcgcaggtggatggatcagcgacatgggaaacatgtcgttaatgacatcgagaggtatagagatgacgatgattctccgggggatgctcccggttgtggtatcattgtgactgagaaccccagcggtactgctactgaggtttctgggaagggggcttcgtctcgggttgctattaaggagactggtgagccgagacttgaagaccacatcgtgtaggcgttgctacatcctagctagtataagccagttgctattcttcgaaggcaagtgttttaatatccatatatcctccgtcgtgtagaagtaagcatcttccaatggaaaatgaataccaccaaaagtttaaggtgcacgaggctctgcgggtttaccctagctccttcccttctggtcaaaaatcgtcacccaccctagttcctccttgaccttaagccactggacaggtataaataccccctccccctccccccccnnnnnnnnnnnnnnnnnnnnnnnnnnnnnnnnnnnnnnnnnnnnnnnnnnnnnnnnnnnnnnnnnnnnnnnnnnnnnnnnnnnnnnnnnnnnnnnnnnnnnnnnnnnnnnnnnnnnnnnnnnnnnnnnnnnnnnnnnnnnnnnnnnnnnnnnnnnnnnnnnnnnnnnnnnnnnnnnnnnnnnnnnnnnnnnnnnnnnnnnnnnnnnnnnnnnnnnnnnnnnnnnnnnnnnnnnnnnnnnnnnnnnnnnnnnnnnnnnnnnnnnnnnnnnnnnnnnnnnnnnnnnnnnnnnnncatttctctcttttcttctttcttcctccttcacatctctgggtctgtctctacttccacttttcaaggtttcatcctccaccatggtcaccctccatccacctttccaccttgatccatcatcgaacatgacttgataccactatggaccttccaacttggtcgccttccactaggtcactgtcattgtgatcccatccatcatggaccctcttggtcatccatcaatccaacatgactttgaactatttgcatttcttgtgacatctatctatccattgaaaggcgaaccttgctaactcgtttttagaaacctccccaccccctccccctcacttcattatgaccaagtgaccatccagcaactagaaaccgttccgggcgacaggcttgcagtgaaagcactccggccggtagtttaaatgctacttactgcaagtttccagcaactgggcgtggcctcgcaaagcgactcagtcgacacgcttatggtggaagcactccggccggtagtttaaatgctacccaccataagttgcctcggggcaaaccgacaaccgggcgtggcttcgcaaagcgactcggacggcaacagcttcttgtcagctattataaacacaattcgattatggtcaataacctctttttacccctcatgttccccttcccttcaatcactaccttcttcgatcaccatgttctccatcagcccccgcgtcaatgctcgtgctcaaacctacaactggcttcatcaattttcttggtcaaactacgtctcgtcggtgtctacctcatattccgtgccaacaaccatcaatgcggcgtctgatcctttctatctcaatgccaatggcaaccaaaacatcgattaccatttcggtcccgaagctacttcaaacaacaagaagcccaggtcaaagcatcattgcttgttccaaatcccagtggctcggtttacaaatgatcattctctccagccaaagaccaaaagccaactgccacatatccactacaggctcggctgatattcaggatgcacataaaattggactcctcgggatttatatatatgcgcagcagggtttgacgtgggggctactaattttcctacattttcgcattcttttgccaggttccaaagtcgttggggtgtgttcgcaaaaaagaaaaacattccatgtctcatacataccaccatagtattcttgttctcacaggacacttcatgtaaagcaaatcaatggaactttcatgatcatctttcaatttcattttaacaacttaatcttccaagtaagtcgagttgcaactactgtcttctatatagtagctttttatttcattatgctacgttcactcttgtatctctggttttttggcgaagcgaagcaattaaatcataacctctcgtgtatgcatgtcacgtgaccaggtggtttgtcctatgggctccaaaatcagtagaaataatgcggtgaagaagtagtctgctgactttggcagaataacctagagaatgaaccatcatatcttccccagagcttctacagtcacactttacgtagtattagaagttagaatcagtcgttttgctctgcaacgactatcgggcggccgtccagatccctcgtaactttataaacttcattgatgcctcaggcgtcacactagtgacgtcaataccatctacataaccccgagctgtcgcaatcccaaattaaggagagccatccctacataattttcctctacaaaattggacgttcgatgttgttgtctcatttgctcgccttgaaaatcaatctttttctaaagcatcaacgccaacaaaagaatgagcacgctccttgaaagactcttccttgcgtatatgatgattgcttattgtagttctatcaaaatttcaatttcttggaactatcagcgagcatgatcgcagataagagctcttcttcaaaagacaagacagaacatgtctccctcttctcaacccaacctcccatcttcattttgccaatgcatctctccctagaggagctggacgagattgaaggccgattgatagattatggcggaagacttacctatgatattgccgaagctggtctcgttttgggaaaagtcgggcgcgtgaagcgtgcagcgctggaactgcgcacccgcggtgtctggacagaggagctcatacccagctcaactccaaaatcaattggcggtggcggcgagccccctctcaagcgcaggcgcacagatcagtacgacggaatcaatgatgtcccggttgagattatcgatctcagtaccgagtctgaaggcgaggatggagctacgaatcaacatgatccatcaaagcagcagatcgcagagaaaaaggcagaagcaattgaaaattcaatcacagtactgaagctcgagtggctggatacctctatcacatccggcagatgtgtttcccaagacccattcgttgtctaccgtgggcgaaagatcccttctcccccaacgacagtgtcagaaaataagcaagacttacttaaacagaaatcaaatcaaataatccagcgtgcaaaggaagatgctggtgtaccaacgccacgagctcctcctccggaccacattcatgcacggcgctcaaaagaaccccctgacagatcttcccagcacccccgaccgacgctataccgaaagacaacctcggaacatgaaatggatgaatctaacgcaccctcacaaccagactgggtccgtgaccaagtcatattcgcatgcctgcgctcagcacccttacaccctccaaacgaagattttatcttgcaactcgtgaaaataagacgtattcgcgaactcaccatcgacaagatcggcgtgcgcgcatatagtaccgccatcgcagcattggcagcatacccatatcccatccaacggccgagcgagatcctcgctttacccgggtgcaacgccaagattgcggacttgttcgcgcagttccaacaacatggtggctgcgagcataccgacgacgacgggaacgttgccgctgccgactcgctggagaaagatcctattctccgggttctgaactcgttctttcagatatggggtgttggggctaagacagcacgcgagttttaccagcgtgggtggcgcgacctcgatgatattgtcgagcatgggtgggatacgctctcgcgtgtacagcagattggagtgaaattctacgaggagttccaggaaggtattccccgtgctgagagcgagggtattgctactgtgattcaggatcatgctgctcgggttcgggcggaagatgcaaatggaattgagtgtgtgattgttggcggataccggcgtgggaagcaagttagtggtgatgttgatgttatcttgagtcatcgtgatgatgcggtgactcggaatctgattgttgatcttgttgcgagtcttgaagctgaacgatatatcactcatacgctctcgttgcatttgacttcttcgctgcgcgagcaacagacgttgccttttcatggtgatgatacaaggaaattcgatactttggacaaggcactggttgtctggcaagacccacacttcgatgctacagctgttgaacataatgaccgtcaggtgaaaaatccaaacatccatcgtcgtgtcgatatcattatatcgccttggcgcacggtcggttgcgcgatactcggctggtctggtgatctgacttttcagcgagatctacggcggtatgcgaagaaagcacgcttcttgaagttcgattcgagtggtgtgagagaccgaggtactggaagacaagttgacctcgaagaagatggagagacatgggaggagagggagaaacttgtgatggagggactgggaataggctggagaccaccagaagaacgctgctcgagatagaaaccgatcagatctcaggagaaagagatggacgtaaaaacatacatatattagcgatgtgtacatcgcagactcagatattatttcatgagatacgctaaagtgcccactagtgacgacaatagcgtacaaagctccaaatcacgcaacccgactaagagttgaataccaccagaccagttcccacatccacacacatgctaggaattatggttatcgaatagattggaaacgggggttactgcatctgccatgttcaagtttcgcaagactcagctacaaccacatcaggtaaacaggaaaaaagtgatatgtcacagcctccacgccaatcgtatggccataaggacgacccagaaaaaaggaaaacataaggtacacaagatacaaatctaccgaccttcggtatggatgcataggagcgaagaaaaagaagagcgcaacaaacactgcaaatgcacaatgcataatcgacctacagcgaatcaatcatcacaccataggccttgagctagccatctcaccatagcgtccacgactcctggtagtgtcgtaagcactgagaacacgcatctggccgccatcgtcggcctgggagaaggcgtagccgcgctgcttacgcatgcgctggacctggcggactttccggatggctttttggaactgttccatgcgtggacggtagtcctggacattgtatttctgaatttcctggacatggtggtattgttgtgggtagtacatgcgcttggcgtacttccaggcataatcacgtaggaggcatatacagggtaggacgatagccatcaagtagaagataggggacttgaagaccacgggaatggtgccgtagtattctcgcgagaaacccaaggctggggcggcgtaaccgtatgccgggaggaagatgagccacagggccattgatcctgggatagcaatgaaggtgtacttggtccaaatgttggttatcagagcagctttgccgagaacggtacctagcacggcggtgtaaagagcttcaccccagacccagtggccggcaacctggccatctgccataggaaggtcccagtagaagagcaactgagagacaatgtagaggatgagagagtggaagaatccattcagaatccaggcccaaaagctgtgcttctggaagaatacacctctctgacctagctggtatagctgtgggtagcggtcgagcaatcgggcggagatgaactggtcaaagattcccatcgcgaatggaggcaggacagtgaagaggacgttgtagaaggagagcgtccacgattcgtagataacctctccggagaatgcgttttggaaagaatactgtaacaagtcaggtaccactccaaatgactcctcaagtttggacttacccagaactgagtcatatacagcgtaatgttcttatagtatgagtacagaatgactcgactgatacgagaatagctccacgctccgtgaaccaaaagcaactttcgaaggaacctgaactggccaattgcgacatcagcagatcgtgcggcctgaaggccttcgacaccgctgataccgactccgacatgagcggcttgaatcatggacacatcattggcaccgtcgccaatggccaagaggagagccttcttgtggcgcttgacaagcttgacgaccaaagccttttgaaggggagagacccgactaaagagcatgttagaacaaaaatataatcctccaaaaattcaacggcgcacttaccaacaaacaacggctttgcaaatgacagccaaatccaggaatagcttctccatgtctttctccaatgcaaaagtcaacgaccgcccgtcaattaccaaagctaaaggttcggagtccccagagacaatttgactctgtacggcgtccattttcttttgcaagctgtcacgggtggcttctgacgactcctcgttgatgatgagaagcgtcatgtcttccgaaataagtttgcaagacatgccgatgttgattgcagtctcctgtcggtcaccagtcaagacccaaatcttgatacctgcagtctggagggtgtggatagtatccggaacaccatcctgcaagcgatcctcaatagccgtggcgccaagaagatagaaatccttttcaatcagttcggccgctttgtccagttcatccgcgcggctgccgtcgacagttgtagaagccttgtcatagatctggtaccattgctggaactcgttttctggaacttcccgcatagccagacacaaggtccgtagaccatctgaggcgtactcctccaggtgctggagagttgcttccacggtagggttatcgggatgcagccgctcaataataaccgtgtcagcacccttacagtagacgcggacctttccatctggacaccggaaaatagtggacattcgttttctagtagagttgaactcgcacactgctagcagttcgtattcaagctcctgtccaccagcctcaaagatcaccgatcttggtcttctgttggtgaatcggaaacccagcgaggcggccccatctaccaaggctccctcatccggcgacgctgcttggtacttgatcacatttgggtcatcgctgtttcgctcaggaataacagtgtgacaggtggcaaggagagtgagaaattcgcgaatagcgttctggcttgggtgcgattgaaggttctctctgagtttcttgaaatcataaatcccaacttcagcatcatcctccatggcagcacgtcggtcttcgggaacatcatcgccatattggataccggcaatgctaacttgcttaaactccatcatgttgcaggtaagggtgcctgttttgtcggagaagatgtactcaatctgaccaagctcttcgacaagggaggatgtgcggcatatggccggggtgtcagttttatcgtagtaaatgtcgaggtcggagttgatgaggaaggcttggaagtatttgacgatttcaatggtgacgaagagggaaatcggaaccaaattcgaatagagcacccagtacgtgaaaatgtccataaaaaactgctttaccactttgaccgacccatagtcgaggtatgcaagcgatgaagatctggtcctccgaatagcaagatcaccgacagaactgatgacactcagaacgatgagaatgctaacaagcatcaaaatttgaatgttgactgttcgctccacggctgttcgcttgatcggggttgctgtcgcatttcgcatcagttttgtctcgtggccactaaaaaccacgattccatgaatccagggagtgttgcgcagcgttgcaccacgaagtaggagttgatccggagccaagggtaactctttctcgccacctccagcattcatagtcaaggtggcttcgtaagtatacagactgctatttggctgttccgatcgaacgcgtccgctcagacgactcagatcactggggctgaccagatgcgcagtctccggaatggcttgcttgattttaagattggtctcaccatccaggtttgccgtttcaatgtagcatagaccttcaggctcagatgacgccaatagtaccaagtcggccggaaaaggctgctcggactcaaccctaactatatccccgaccacaacatccacccattttgcatcgtggaacgaagatcccttaagaacttgtgttttcgagtaattcagtcctctgtccgacattctccgtttgtagtcctctaccaattctttgatcgccgacactgccaagacgatggccagcggaacgatagtcgtgaacttatttgtcggcgacacattggggatttgttgcagaacagcggtaaacaagaagaacaagttggcatatttggagaattgctcgaagaggaatttcggaatgaaggtaaagatgttgtacttggccgtcgatacgaagttgttgacgaacctgtgagtggcattggcaggcgggttgttgagctgaatcatgcgcgggcccagtgtcgagggatcaaccttgcgtgcaaagatattaaggtctgacacgtggaacttcttgcgttgcttcgggggtggcgctggagaagcatcgctcccaactgttccccttcttgcgcctgactcggtcaacggaagatccatttccgaatattgcgatgaccccatgccaaacatgtatttcgccttgcccatcaatccacccccgagtccgagaacgctgttgcgctcatttgccttgcggacgtggtgtgaactggcaattcgttcttcgtccgcgtcgagatcataataacccgagtgcccatcgtcgaagtcatccaaagaataccgccgataattgtccagtccagaagtctgggagtaggaccgatctcgcatgccgctggagtaggggtcattggaatggagaccgatgttggcaggcggatgcgccggtctagaaggagcattttgctgcgttgcgccctgctgtgcgctggatccgacaaagttatcataggaaacagaagggcgcggttgtgtttgggtgtacggttcttcagagtcgtcaatgttgtagcgttctaataggtgttcatcattgacgggggggccttgaccactgttatactcaggtccaggatccaacagcaggtcgtcatcgcggccagcggctggatgcgacccaggaggcctaccgctggccatgatgccgcggggaagctgacagcctcactgatctatcgcaataacaatgcccctgaggcattaatcgcaaggtcacgtcgacagaaagcgctctgctatatctgtcggaagcaggatagttggaaatgaagtatggcaaaaaataacagatttgacgggacttggactgaaaaaaatgtgggaattaagtgagaatgaggtccaagggtggcttagcgggcgaaggcaacaattaagctattgttgcgcgggtaggcggtaaagcagttcacaacaatcaaagagaacattcggaatgatactctgattattattcttactagagtgattgtacagtcttacaaacgctttatattttctctgctctctgctgtgtggtcaaaatgcacttctagtcattggccacctccggtctataatgaatggagctaagaataggggactcttggcagccggaaatatattaacagtgtatcgatgtatggaccgacactagtcccactttagagatgaagatctgctgattgagaagaaaagggtaaaagtagctgatttgaacgatttccctcaaatcttaggcgaccagtttatatttacaactgaggaatagtgattcagttcattcatctactagcccgcacccatatgtcgcccatcacgtggcagccaagtattattgatgtaaacgccatgcgaaactccagtcccccagtcatgaaagtaatggtagtacatattgtttattcgatttgaaccaaccggtcgttttctgcccgagactcatcagccatgccaatcttcgcccgcttagctaggtcggcttggaggaccttctcaatagcagcattgatctctttgactttctcccatgccacatttgtcttgttcacgatcgccatggcatctgcaggtgcacctgcgtacttcgagaggtagcaaacatcgcctgcgctattcatcccaataacaatatctccctcagccgcctgctcctcctttagggtggcatcaacaatgacatgtttgctatcattgtaggtttggaatgtgaccgagagaggcttgtgtgttatattcagcgggacaggaacacgttgttccacgccgtagactatgacacgcccgtctctcaccacagcatccggcctgcggaagtgttgcagcccagccatgaccgcaatgcaggccgcatcggtgatatttccatcgtagtcaataatgtgaacatcggcccgaatcgaccagcagctcacacccttcagaatacacaaggattcagtatcgagggcattagaatggcggatgatacgatcaaggatattggtggcgtatgcttcgatgtcgttggttctgtagagataattgtgagaacaaatcaatatataatgaaaatgcttatgatatataccttccgttttcccaggccggtgagcccattgcactaagctccaggttgatgttgaagagcccatcgaaaggtcggtcttcacgcggtttggtaacctcagcggagatgcgaacaataatgctagagaatcagtcagtgatttccatttgtgataaaccaacaaaatatttgaagctcactttgtcttcccaagttgtagcttcacatgtccatattcttcaccaaaggagatatttagaggacgatagtcgtcaggcttgcggccatcgagacgcacattctcacagagtgcttcgagaataaagtcgcgctctgcgattgagagttgcgcttctttcgacatcgttgagggaggtctagcagccccggcgcggggatcaagagttgctttcttttttgggccattttgccaacgcaggccgcattgtagcagaccggattattattatcccgggagttacaccaataatagcggaagttttgtagagcggtgacggggacgtgaggagaatattagtgcctgaggcgactacgtacatcgaaagctggaagccgtcaacggcccagcaattccaactctcacttagcaaccacatcacaaaatgactacaggtatgccattcgaaccaaaattggagtatttggatagtcagagctaatatttatttagcccacagacctacttttgacccggtacggcaacttttcttaacacgactcttcatggacactaactgatctcaacaggctcaaggtaaagaagccctccgtggcccagcctaccaccagagactcctccctgcgcacaaacacctcaaagttcggtatgtatgccgatatttagtcagacaaccccgatcactgacattattctagccaacccggacaaggcggtgcagctgacgccgacccatcgccccgtgaccttcgcgcggagcttctccaggccgaggcggcgcactttgccaaaaagaatggcgttccggtcgaccagccagctattgctgaatcctccgtccctaagcgattgcttgaagctgcgccccaagatggaagcgagggcgatatccaggaagaagacccagaggccaaacgccgacgcatattggaggagacgcgcgacatcgatgccgattcagacgggtcggaagaagacagcagtgacgaggataggtaggtaaacctcaggaccacatgcttaggacgaataaactgacaaatcccagcgacgacgaagatgaggcagccgagttgatgcgggagcttgagaagatcaaaagggaacgattagagcagaaggagaaagaggtatctcgctttctcgcactttgaattcgataacggcggctaatgcataacaggagcgtgagcgcgcggctgaagaagaagagcaacgtgaggttgatatcgcacgcggtaatcctttgctcaattcccaggatttcaacatgaaacggcgctgggatgacgacgttgtgttcaagaaccaggctcggggaacggagaacagagacggcaaggaatttgtcaacgtatgcttacttctatttggcttgttcttatggggtttaactaattcgttttcaggatcttcttcgttctgatttccacaagcgctttatggtatgttcatatgatcgctattattttgatacatttactaaccgggttttcagggcaaatacgtgcggtagagtcttctaggatactagagcatccagatgttagttcaagggtattcagcttagcgaatgggtcttattcttatgttatcttcaaatttgtatcaaaagagcatcataaactgtcaataattgtatccccaaaaatgctcccagcaatctctacaacagtaccgtttcaatatctctgctggatcgagtggagttttgttgtaaatcagcatgtgttctgtatcattcgaatcggtccctaccaacatatgaaatatactatgagtagtagcttaatgtatggagtatggcttgaaagatattggtctccaatatatgcattaacgtgcattggccctgtcgtcagagcttaagttgaagggattgtagtagttgatttcctagaaggacattttaggtacttgactaaaatgcatatagatgacttccagccaattttgttgtattattattcaacatgattgcacaggagctcgaggcctatttagttcaccagaaccccggctggctctctttccccacaaattcttaacatctgagacggccgaagataggaaagtccagtatccacctttctaaaatacccataaggtactcctgatgagctgtacagcagtggagggatacttaactagggtgctttccatagagactagtcaaccatcccagtggaataacgaagtccctcccgctagggaaagtcgagtacatatcgttggcacatgtaggttgcatatttcttcagaatattgctcatgtctatcttctaaatagaaagtttctataacgatcctaagaagaatctgtgacatacgcaactcatttgggtgcatcaccccacgaggggaacaccattggaagagcctctggagtttgatcaggccaattggcctggattaccttcataatttcatcgtagacgatgcggttcccagccggagacagatgcagacctatatgacgagtgagtacaagagaaatgaaagggagggaatatgcatatttcacgcaccatcaatgagcaaactagccaatctctcattgcttggcacatcatgagccccaactagaggttctccctccttccatccagtggtcttcatgaaggcggaccatagatccaccaccgggatattgagcgatgcaccaacctcgcacgcagccgctgcatacgactttgtgaagctcgcagttctgcttgggaacggggtattctttatagcatcgaatttctccagttgatattcattgatgggaggtgggctgatcaaaatgagtcgtgggttctgtgcgcgtgtcgctgggtgttgaatgattgtcttcaagttctctttatattgatccaggggcacatgctggctgtgtgttggaacgcacgcatcgttggcaccgaagaagatagtctatccgatgttaccaattggtatttcgagtacattcgatatttcaaatggggttgctcataaggagggcttaccatgagtcgcacattagctgtttgcggcaaagggaagaacttatcaaagacctttacagcatgggcggttgaatatccactgttacatgttagcatatcccaatgtattatagctttggatgatcttacgctaggccgcggttgacaacatccaatctacgactgtaggctgattatttctttcattagcttattgaccatgcggatctcttgggttgtcagaatattgactcacattcttggagcgcagcatgaaatgcaaaacctagctcttggttgcaggccatttgagtgatggagtctccaaagagaataaattggtcatatggtttgaatgcattcccatccccatccccctgggtctcgatggtggccatggtgaggcaagaatataaaaataagatcaaattacttgggagtttggaatttaagtcctgggaattgaggattgggggctgataacaacaagaaacggacaggaaaggaagtgggggaagtcactccgcggacaaaaaggaaattggtggaccttcggttgtcaactaaggaatgaatacatgtatatcatcaagactagatcatgagaactacatacatatgtatgtacaataccgattatctaaatctatataaaatctcaaatcaatttatctatccgttcatcgaattgggggtccagatctgaaccccgcactatacgaataggagtataacatagacctttgggttactattatatcaaggtagcttacatgagtataaccagattatttacgtccggcatcacgagtttgagacctctgtacactctaagaatgcccttctcgtcctcctggtccttctaactgtacgaagtagtaatggtgatctgtgtccatcgcgaccccacccaattccagttttccaattactatagttattcaaaggaccatgggtggtcagagaagacacaagaggaagacgaagtcccgtgttagtcccgatataggaaggggccacggcttgaaatggccttgatgaaagttttggaagactcggaatttcagagttcgaacacgaaagtcgaagtttttctgggattgatataagttgaagggccaaggctaaaatatagatgaataggaagaaaaagagtgatcgggttttcccggcgcttaaaagtgacacctaaggttcgagcacatgtaattattccgcggtattcgcataggatgaaagctagcgattctcttgttgaatactggcatggaatttttacatgtctagctcgatggctagttgatttctttctccctgacctacttcgcttactgagcaaatttaccagaactagataatcaagagatctagtaaatgaagatatcgaattgcaccatgaatgtgtggatggatatagaagtgcagagctatgggttatcggaaaaatgaaacacaggagcaagtaatttctcttttacatgacatcgctgtctgatgatgctcaactttgtcccactattcagcatactttttccttaggagagagtagctttgagaccatgaatgtctagttcttcgctgacttcaagcaacacacgtgcatcttcttgtactaaaatagttgtacacaaaatatgtgtagagttatcgtgaccccgacccataaaagaagctttgggactacttgctagtcgccgaaacccccatatgcccgaaagagcggtaaaggggatcgtgctgaaaacggtgctcaaaatgatcttctagctaactacgtaggtatggatctcggagcctatggacgacttgtttataacggatccttcaatgtctatcaacatgtaaagctggaaccactccccgggtgatatgttcgacagtatcgagtttattcatacctcaaagtagactggtcctcaagtcacccccgtgctaaagctgatattcacatctgaagaaagtcagacatccgaaagaggctgacgttgtctaccttaggatgacagagtcacacacccacccctcacacggtggcgcacgcttcataaagcatgccaagagatcagcgttgggtgacgatcggattggacaacgtctggcagaaggattccctcagctgggcggatgctcctagtttagtaacccaaagagatacttccccaatcaactaactagctatgatacctcgatgctctcgtttatcgtcaatgattcatcagtgtgtggaatgtacattcgcgattcgacgtgatgcagccactctaggcgtagtgaccttgttcatcttgatcagctgggtcaaagtgtccattgcgacaggcatgctctcctgtatatatattgtagggcaggatgtaagtatacctatgtaccccgtgctcgcgacgccactctggacgtgcagcggcaccccgggattcgtttcgagatgttgatcgtaggaaaaaagcagggagagagaccatcaaaccaccagcacaacatgccgagcattgaacattcagtaaaatatattaaagatacgcaaaatgactctagtggctggggggtcactctcacctgacgcgtccccgccgtttcgatggtcacctcatcttaagactcggaccctcttttctcaccgtccatctttttgtgtttttgtgtttttgtgtttttgtgttttgtttttatctttccgaagaatataacttttggaaagagaatatgctacctagtaagtcgagctccttgatttctttgctcgtgtgagttgtttgatgtggatcatctctagatgtcaaaactgactccttgctagccccactgcatataattgaagcataaaggcttctcggcgacatgcctcgctcccttccaaagtccagttttgcctcgcgcgaacaggacgacaccgaaaacgtgcgcgttccccaaacagctcctccctcaccgagtatctacagacgatctcaaagctacctctccgaaacacataccgaataccagtccctcgatgcgccgttcgaggttacagaaacaacgagcctccttgggcccgcccaagccttccgccgacgaggtccgcgacggtcttacaccagcacctccggggtttcgggcaccggtccggactcatttagacacgttctggcggctggtagcctgcggcggacgctaaatcatagccgtgccaactccatgagtagggggttcagccggcgagggagcatggacggcgacagcagacccgctagtcttcctccgtctatgaaggacaatcttactgcctcttcatttctggatgaacggacttggtatgatcaattcacttccacagattgggtgcatgacagtatcgccgatggagcgcggcttcgcctactccgtcagcggaaagatgtgcgaggccgattgctggcggctttcgacggtgcgcaaggatggatcttggtcgcgctcattgggtgcatcacggcctccattgcttacttcgtcgatgtcaccgaaggatcggtctttgatctgaaggaaggcttctgcacgacccggattttccgcaatcgaaggacgtgctgtgaagggctggctgcttgtgatgcgtggcggtcctggtcgaggatcttctcaccatcgggtacagaaagccagtgggttgactttgtcatttttgtcttttgggttgtggcattagctctcatatcgtgtgctttgactctactcacaaagactgttgttccttcttccatttctcttgcgacgcttgatgaaaacctgggcgctgacccccgtggtacaaaatctgggaatggccttggtgcctcggattctcctctttcggagacagagacaagcccactacatggaactttgcctaattatccgtcccgtccagctatgatctactactctgctgctggcagtggagtggcagaagtcaaagtcattaacagtggttttgtccttcatggatatctgggcttgaagacactagtcattaaaaccattggcttgatttttagtgtttcgtctggtttgagcttaggcaaagaaggcccatacgttcatattgctacctgcgtgggcaatatctgttgtcgtctgttcgccaagtataacaaaaacgatggaaagcgacgagaggttctgagtgccagtgccgctagtggtgttgctgttgcctttggtgctccgattggcggcgtcctcttcagcttggaagaagtcagctattatttcccacccaaaacccttttccggacgttcttttgttgtattgcagctacgttgtccctcaagttcctaaacccctatggaacaggcaagatcgttttattcgaagtccggtacctttcagactggcaaatcttcgagattttcattttcatccttctcggtattatgggaggcgccgctggtgcgctcttcatcaaagcctcgaatctatgggcacgatcattccgtcgcattccagctatcaagcgctggccaatgcttgaggttttcctcgttgcgttgtttacgggtcttgtcagtttctggaatcggtacaccaggcttgctgtcaccgaacttctatttgagctagcttctccgtgtgaatcagatgtggaaagtacgggcctctgtccccgcactgacggcattcttgaaattgtccaggaccttctggtggcgtttgtcatcaagagtttcttgaccattattacgttcggcatcaaagttcctgcgggaatctacgtgccatctatggttgttggtggcttgatggggcgaattgttggacatttgatccagtactgggctcttagacacccgacttttttcttattcgactcttgccctgcagttgctggaattgagtcgtgcgtgactccaggagtctacgcattggttgccgctggagcgaccatgtgcggcgtgacaagactgtcggttacattgcctgtgatcctgttcgaattgacaggaagtctcaaccacgtgcttcctttttcgctgtcggtgctctgcgctaagtggactgcggatgccattgaacctcgcagcatttatgtaagttttgagatccgcctcgtaacttaaatttgacattatactaattgaaaccaggatctcttgaccgacatgaactcctaccccttccttgatagcaaactccaaccgaccaccgatgccttgctgggggatatagtccgaccagtgcggaagaatcgcatcatcgatatctctgcatcaccatttttgccagccacagacctccgtttgaaactggaacacctgctcatggcaggcgagctagacagcggacttcctattctacgggacggtgtcctagctggtctgatcccggcaccggatctcgagtacgcactagatacgctgggcgaggaagaagaaaatacgatctgtctgatggccatggacgcttcttcagccgtcttggacagcgataacgaggatgccgacgaggtggatttcagtcaattcattgaccctgtaagtttggttaacttcttcaatatcttggcccatactaatttgtttatacataggctccaatcgctcttgatgttcattcccctatcgatctggtctaccaatgcttcgccaagctaggtcttcgttacctctgcgttactcgggacggaaaatatgccggcctggtacacaagaaagcattcgtgaaattcatgaaggagaatagcgactaggccgtggaaatcggtcgaccactgtactacttctcatttgcattttccggcgttgcctaggcattctacttcaattgtttgtatagccttgcatatcctctcgtttcattccatgtctatcgattatgtctgcctactcaaccaacattggcactgtgcatagttttgttgtatatatctttcttttggacagctaggcatgaagtacaaactttggaacatacttgactagtcatttatcagggaagaccatatcctacccatgtctaaatcaatttttcaaatccaaccatctgaacctcaacatccccgtccttcttccactccaaatcaacaccctctccaacccactcggaaacctccccggggctaacaggccgccacccattcttcttgtgaagcccatccaacgggaagaatgtatcacactcaaacgaagtaggcacatctacagccccctttcgcacaacattcgtcatgacaaccctaacaggccgaccacgtagctcctcggcacccatattcaacgtagcattataaatctcggccccacctataacaaaaatcttgccaagcgtcccctgcgccccatacacagagtccaactgctccaaagctgcgcccagactcggtgtaacaatcgcatccgtcaccgggcccaccggcggagctggaacagcatccttgggcggctcaagagcttccttttccgcacttgtggcctgtgcctgagcggccttagccgcaatctttctcctcatattccctaattcggcagtcacgctctcgcgaacagacccggatgtgtcacgcgtgaccacaacgttaatgcgcttcgcgagtgggcgcagtgaggctggcactgagtcatacgtcttgcggcccatgatgatggcgttcgtcgtgcctggacccggtgggcgggatgttacgcgagcgaagaatgacatgtctgtttttatgcgcggccatgggagcgtgccatttaagccgattcctaggcgcgtgatttcgtcttttgtggttgtcgacgcggtgcggatcggggtcgtcgccacgatcagggtgagggagggaaggggttgcgggttgtgcggtggcattttggtttgcgaggtgatcgtagttgcaattagagaacaaaatattgttattcagagatggggagtgtgatatttgggttgtgagggaggttgttgaatagtggagtggaggctcgcgtcgcgaacagagaaatcgttatcggagttgggccgcttatcgcctcgcagctccaggtacacgatccaatgccaacagggaaacattacactactctattctaactcggtcagcgaagcagcagagtgatagtcaaaaatgtgtttgtattcaacatcacaggaaaaccgaatacgccacaacaccagtcgaacgccagattaaagggaccaagtgggtatcacgcgcgagacagctccaagaaccaacgaccaaaatgcttaaaggagatcctcggaaaattatcgttacttatcggattgctcagagttcttggaattctcagggtcttccgtttcgtggtcctcaggttcatccgacgatggcatcaacaatcctttgtcaagtgcgctctggatggccgtcacatcctcctcgagcttttcacgacgctggacatcccgctcgtcttcgccaagagtatcgagcttaccgaagagccagagctccttcatgagacggtgcaaggcgagcaggtcctccgaggcacggatctgagatagcataatgtcaatttcgtgctctggtgtgaattcagaagctcaactgcatttttcttgggaaggggagaggtggccgggtatgaccggggcggcgcatgtcaacataccagcgcagtggattctacatcaatctggaatgcttctacagcagcatcaacgtgactggtgccgtcgaacttgttggcagcaatggcgacgatattttcgaaccgctgcagcagctgcgagatatcatagtcgacgcgatctgccgcaatacatcgttagcggaaaggtatgggagcatggtatagttgcagtggctcaaatatagtacgcaccaagcaactccttggcagttggacacgaatccatggttggagcgtactttttgttgtcttcggatgatgaaggtaaatccgcgatccatgttgattacgataagaaaaattgtggggctggaagatacgggtagacacgggacgggaacaaaaccgacattatccgaacttaacatcctaacaagccaaggagtaagccatcgtcgctccatatcttgagggccttgctcttcaatgcctcccattcctcgtcttggaattgaagacccatcgaagtgctatgaatagacgtgaaagtgtctgcatatctaggaaagagctttgaggcccaagagcgaagaagagtctttgggcctttcggccctcgaggacatacatagttggtaagatcttcgcggcccttctcacgaaagatagcagctagccgcaattgctccccagctagctcattagagccgttgtagaactcggccagcggccacatcatgcacgggaacaaaatgcggtttgggtccattcccagtctatgactcccacaacatcgaaacaatcattaaccaaatatggtcacccttaccatccagattttgctaagccgtcaggcggtgaagactaataagtcacattgatcacctaggcacttcagataggctatagccatagatgtatgtaactagaaatactgaatatgcttgccaaataactccaacgtattgagtaatgacttgtataggagcccacagtttttacagtataggctgtatcacacgggaaaatgtgatatttagccgtcaagtggtggaatacccgaagcagcaacactagtcttcaagctgatatcctcattcaaatctgatggtggtcatgtactttgcagatcgggaggatgccagcttggtattgaaataagaccgtatgacactggcctgtggcaatagttgtatatcttaattggccatgtacttcgacatctcctacatagtagacttctcttagcacaaacgttgtgctcactttgttatcgtagtgtgcgaatagtaccagcggtgcaagttggaagacattgcactgctagatattgagtaacatatgttatgtagaatacgaaatatgaatagacgttatggaatggtggagtatacagccttggaatgcgcgtatagtagaaggtctagccctggggcctatgatcgtcctttttcctccactttaactctccgctttactctccgcccctaccgtgcgtcaccgcctacacccttcgacaatggttcctctctaaattactcctcacaacaataatcctttcctcctgttgctaggtttgctacctggaaccctttctctccgtgtctgtatcatcctcttgaggcctctatagtcgcaaccttgtgttactttggtctcgatttcgcatcacttcgcttgcaccgacggcccaatcatccgcgactcaacttgtgcctggcacatcatataccatacgtcaccgaatacttcatcgcgtctttctgtggacttgagattgctcgtgaatcgcctcaaacccatcaataatctcgattacgataccaaccatcttgaaacgcgttcccttcatctgtgccaataccatcgtctatcttccctcaactccctgctggatgttctgatcaggtctccagatatttgtccttcgaagacagggtggacggccggtgggccgtctcacagattgaaggcggcaggagatattggagaaaaaggtgtcgaattgaagtaacgccgttcgcgcccctgctcttagggtggactattccaactaccccgcgtcaccttctctgctttattttctttttatcttgagttctcaacactggaaactggactggcgatggacgcgcagtatccctttgcttcccgtgacgacatttggcgtgtttttgacgagttgaaggagctccacattgcccagtacgagcaaggagaacggctcgcgcaactggagcgtcgccgggacgaggatgcccgactgagaagtccttggtgtcctgtctcgccgtttccgcactcggttggggcaatcgctccaggtagtccacctctgcccttcacgatcagctcgccacttaccaagacatcccttccagaccccactttccactcccccccggatgctttcaaaggattcgatcaaggtcatcattccgcaatggccagttctgcgatcggattcgatggcgaagacgagcctagacggggtacgtcacgagccaacagtgtccgttttgacgaaagtgctatccacgggaacggccaggctagccgttccagcaatgaccttcctctgcggaccggcagcggcttgagcacccacccgcttcttgagcggacattttcacaccaatctgatggacgattgagctcctctggccactcacaccattccgctcggactaacagcctgcgcctgaacaccgctcggctgcttggtactacgcctatcgagtcccctctgattccccctcctggactcttcttgcttggaccggtcccgtccatcattcgctgctggttgactgatactttcactaatggctctctcctctatgcagccgtttgctcgggctcttacatctcaagtttgggtctctctatggtccgcgaattcgggttggagaacatgattgtgtgcgagggcgatgtagagtacatcaagctcccgctttatcttcccgaagcacttattcatccatcttcatcacgccccggaacccctactcaccaagttcctgccgtgaccattcgctttgtggtttgcgagacagaagtcggcgataattcgattcaaatcatcattggaagcgatgtgatgcgtgcgcacaatgctgatattttattctcacaagataaactgatcatggtggacgatgaccacaaccgcgtgtctgttcccctcgttcgtcccgagaaggactccgtgtttaagtccctccgcacttctcctaatactggagacatacgggaacctcctactaacggacatccatccgttggtatcattggccggcctgccaatgttcaacagaaacaggcctcagcgcccccatcgactagtctgtctggcagcgagaatagcgatcctcacaagtcccacctacagaacctccaggctcatgctcacatttcagctgaaacgcgctcagctactgtcaatccaccgactcctgagcctactaaaactgaggatatgccatcttggggtggcccatggcgtcgcgatgccaagaaatccgccagcactgcccagaaggtggcggataaacgcgagatgaaggtcttccgcaccggaaaatccacgagccatgcaaactccacaacttcgggctcgggtcctggcagtgctaccactgagcaggccgacaagtcgtctttgccgattgcttctgtccaccacccaaatactccttcggacaagtatggcacgctaaatcccgtgggtggtgcatcggcgtttggatggctcaacccaccccatcataatgcctcctcctagatgaaacagactaggcttggcttttatgtttgattacaaccgaatctgaaatgatctcggcttatggcatgatacgcaagggttgcgattccctggaaatcaggaaaagtgagaggcgctgagttaaaaggctgccaacatagaaggggaaccactttttctttttagcttgtagtattgctggaatgacctactaagtaaaagagaaaaaattgaggaaaaaatgatattcttaccatttaattcgcatgaccaggacaatatcaactgattcgattctattagtatatgtataatcctcctcatctcccatacattcataggtacagggctggacgttagtaaatattagtaatcaatactccagggggctggagtgcaaaatttacgggaggaatttcagcttctgcctggcaagaatacgttttactcgttcgtttaaaatcacagccaaaatcgagatccagaatcaggacgattggccttgagagcaataataatggcaggtctgctggatcttccagctgaattgattctagccatcggtgactacctacaaatgggtacgagacagataccactgccattccatgagcttggagatgcctaccgctacgcaatagagcgtgatccaccacctagctccaaatcccttcattctttcctactcgccacctgtcgcctgaatagtcttctacaaccacttttctatcgtgatatatttgtccgcagatatggtcatgtcggcgcaccatcgccactgcagcagctaaatcggagtcttgaaaaggacccaggtctccaagagcacatcatctcagcgatcattccatgtgacgactctatttatgatatccatcatttcttttggttttccaacatacgagaccttactattcacaagttcagtgattgggagcctttagaatttccaaacaactcacatattggcacttcacctgtggaatgtctaaagctgattgattgtggggcgcatgagggagctctagccgctgtattaagctggccggcatctttgaagacgcttcactacgacgccgagcaaggtgagtgggagggccatattggagacgaaccagccaaaacctggacatgtgctgcttttgtgcgcacgctgcaaccgcaaaaaacaacgttggtagaactgacgatgacacggccaccgcttgtccatgaaggactgggcaatggacctcgcattgatctgagcgagttcatggcccttagaatcctgcgcatttatcatgtcttcctctgtgggtgggatgctccgcatggggtctggaaaggcttacctcacagtctggaggtgttggagatcttttatgacgataccgagctcactgaattcctgagtgagactgataatttggagcacgacaatttcatgctcgatttgatccagcataagagggtgcatcttccatatttacacacagtgaacatctactcgactgaaacagttcctaattctgaaacagaggaggatgtgctcgagggaagctggaggctggcaccatctttgctcgcgcgcgaagcgaaatctgctggtgtaaagctgaaagtatggctgggatacggggataatcaagacttcgagaaaccgacgttttcgagtcactagtcaaaccaaataatgtattcagccaagtggtaaccacttatcacatgcattctttcctagaacatctactatgaaagattagttaagcactgtacgttacttaaaccaggtcccatcaaatcaaatctttgaaaaaacccccaaagcccccttcgtattatccttcgtttccttaacaagcccactaacagcccggaacgcttcgtgcgaagcatcaccaagaatctcaaaaaggacactctcactactcgtaacaacagccccagcatccctcaacctggaaagcgcaatccccctctcctcggtgttcatactgctgacgccatcaacaaggatgtaaacgcggtgaccgcgctcgagaagatcaagcgtcgtctgcgtcacacagatatgagtctcgatcccgacgattatcacgtcaaggggcgcagagccgggggccgggagcagcttctcgatctccggggttatcattgagaagagggttttatctacgtcagctcggacgtgtgtgtcgctgaggtgttgctggagttctggcacggtgttgccgagtttcgcgcggttctgggttgttacgaacacggggattttgagggctgaggctgcgcggagcattttttcagccgttaagaccctgttggttggttggctttttggtttcaattgttcttgggatatgggattcgtacagtttggggaactcgtagattccattgcggaatttttcttggatgtcgcagatgctttggaattgagtcagattttgaagctatatatccttgtttgatactggggttttgcatacaagagtgccggattgcctggtctagtgttaacttgcactgcattaggattcgggggtttcttacggatccgagatgagcgcgcaagggtagccattactgcaacagtttgtggttcctatgtgaggttttagggactcggtaaaatgtaaagaagagaagaattggcggggacgtggggagtcggagaagtcggaaatgcggggaagaagccgagggaagacgagctggtagactatctttgtttcttttaccgtaaatttcaatcgattatggtcatatttggatcggtatatatcgctcgtctactaatctagggatctatagcttcacctcatgcaccttggcccgaccgacaaaccagctgtcatcaccgtttgccgccgctgtgcgaatggcataaagctcgtcgacgaatgccgggacgaagcttcccgggccgcgaacataatctttggccgctgcgttctccgctgcaatctcgtacatgagaatcccagacagcactgcgaggagtctgtcagagcggtgggcaaccaggaaacagccggagattgtgccgatggcacagccggtctgtaaattcatgttagctgtgtactaaaaggatgtgtttggggaggttgcatactccggtcacttgccccaggtatgggtggccattctcgacggcaatgacccgctcgccatcgctgaggtagtccgttgctccggtcaaaagcacaacgttccctatcttaaattagaaaagaggaatcacagctagaaagcctagagagtcacttacgctcccggcgagccaggtcccgagccaaggtggctttttgattgccgtcaagggtactaggtccactgtcgacaccgcgctgttgaacagtactgctaccccaagcttggcgaatttcgccctcgttgcctttgatcagatcaaaataacccccggccataagctgggtcactgcattgcggcgaatgtgtgtcgcagccgcaccgaccgggtcgtagacgactgggttgccccgctcattgtacgccttgatggcttttaagtagtttgagacactctcgctagtcaatgtacccatgttgatcaaaagagcaccatcaaacttgcacaagtcggtggcttcatcgccatatggagacatgatgggagatgcaccactgtagaacggttagcatgaaaaatggctggccaggtacagtatactgacatagaaagggcaacgttggctacgaagtttgacacaacaaaattgatcatgttgtgtacgagaggatgcacctcgaccatcttacggatgatttggggcacctcatccaacaaggcctcgctctcgttagcacgaggaggattgagagcctgtgcaaaccggggagggtttctgatgagcccggcgagtttctcggcggatgctttggggtcatcagctgccacgatcgcactaacaatggctactccatccagtgatttctttggtgactgagactgatagagcactcgttgcacattagagtggttgatgccgccgatagaaaccgtgcctatggcggaagatttaatcgcatctaggatggcttgagtacctgctgttccgatgactgacttggtattggttttgctatgggtggttagcgtctattgatgggtgttggcatattgaaaatgtggacttacgtgggggtggcaaacatagtaccaattccgatatagtcggcgccatctgcggtggcttttatagcctcctcgactgaggacgtactgataccaataatggcattctcgggaagaagcttctttgcttccgcgaagcctatatttgacattaatacatatatttttgtagaattgtagcaacgaactcatgtcatcttgacctagatgcacgccctcggcaccaatggcaagagccacatcgacccggtcattaatcaaaagaggcacattgtacttcttggttatctggtgtagtttccgggcagtttccaccaagagaccagtgtcattggttttgtcccggtattgcaccactgtcacgcctgcagtaggggttagttgaataattggcaggaaggctggagcaccgttcacctccttgcaaagcactttctaccactgtgcataaatctcgtcccttgagaatggccggcgtcgaatccgtgaccaaatagagcgacagatctacgggcatggtgtgttggccttgggccggacaaaagcggggagtttcggggtaatagatccgaagtcgttctgacgaagagaatcaaaccgaaatgaacaacggattgacaagtccagcagaggctgtacaacgcaagacactgtacttaagtcactgaggaagattgccgtttatcgttgtgtggtcatggtggggtcttgcaaggttcggcctgtactcgtccgggtgtagagaacattgtaaaattcactcatagcacctatatatgcttcaatattgccaatggtttgctttcaaagtgaagagactcaaacataaggcaattcttgtcaaaagtcacctcccatgtactactatacccaacgttcagtggccatttatactccgagttatttccggcacgtgcccgctgacataaccgtgatttgtcaaattctgcttttcattttcttcttctactttttcccaacaacacacaaacactgacaggcatcgagagattttcgaagcctttatctatctaccgcgtggacttccagttctacgctattcattattgatcactggttagttcggcctcgccatcatcacttttcaccgtccgccccaaggtctccgacctctgactcggattcccgaaagaacttcgatcgttcccagcaagcaacacgttgagaagtttcccgcgaacttgtctatgtattcgtcctccgtccaaaatttcgaacatcacctgccgctcaagctgcaaacgtttcgcgcgccgaaaccttgcagcatacaccttcgatcctgtggctgaataccccggatctttcctccccaatttgttgtgacttttcctaaagaaatcacattctataatcttcaaaaaagaaacttgacacgcatgtcttgtctcgtcaacaaaattctcatccagaatcctcccagctttccctcaagcaagcccactgtttcattctagtgaaccaaccgctcagttaaaccgtcatcatggccaccgtcaatattcgccgggatatcacggatcccttctatcgctacaagatggaaaagctccaggctaaagtcgagggcaagggcaacggtattaagaccgttgtcgtcaacttgaactcggtcgcccagtctctcagtcggcctcctgcctatctcatcaagtacttcgggtttgaacttggtgcccaggccaacgctaagccctccgacgagcgttggatcatcaacggttctcacgatgcccccaagctccaggactaccttgacggcttcatctccaagtttgtgctatgcaagaagtgcaagaaccctgagaccgacgtctctatcaaggacgacaaaattaccctggactgcaaggcctgtgggcagcggtctgatgttgaccctcgcctcaagctaagcactttcattgttcgcaacaaccctaagggtggcaagaaggagaaaaagaagtcccgccgtgagcgaaacaaggagaaggctgccaatggcgaggatgctagtccaggtgacagcaacaactccgagaatggtgatgatggagattatgctctcgaggccaacagcgatgatgaagtgacccgtcaagctcaggccatcgaggccgaggccgagatcaaggatcacgagtgggccgttgacgtttccgaagaggccgtgaaggctcgtgctaaggagctccccttggacctcaagcgtgcccttgtccttgaggatgtcgacgacgagggagctgatggaccctcgtcctacgagcagttgggcagctggatcgttgaaaccgctgctgagaagggcggtgttaccaacgttagtgatgttgagatctacatgaaggctaaggagttcggcattgagagcaagcacaagactgttgccgttctggcacagagcatcttcgatgagaagattgctaagcagattgaaggtcgcgctggtttgctcaagaagttgatcacctccgatcgccatgagaaggctttcctcggtggtaccgagcgcttcgttggccaggatcatccagagcttgtcgtccagatccctgccatattgctgggctactaccagaatgaccttgtgtctgaggaaaccctcaaggcgtggggtgccaagaccagcaagaagtacgttgatatctcgaccagcaaaaagatccacaaagctgctaagcccttcattgagtggctcgagaatgccgagagtgacgaggagagcgaagaagacagcgagtagacggtccacgctgcgtatgctattctgtacccttggctatttgctttttgcctctattcttaattgaaaatgcagttttgggccttggtctgcccatctggcattaagtgctcggttcgattttcatgttagtttagctcatcaatccccactcctttacaatgaatatctatatggtatcaaccatcatcaattttcatccacactagtcgtacttgagtacttgtacaagttatgtacgaaagcagaaactttttgtcatgcaatgctatcaacgacgaaaagcaataactagaacattatctcagcaagtctgacttgcgactcctccccattgacaaggatattagtagcaccaccacagttactagcattgcctgtagggaccacatccgcccttaggcgatgccgcataaagataaaccacgttaaatccacattccaagtctccatcgcccgaatcgcttcctcgacagaaaccatattttcaccataagtatcattcacagacatagtcgtcctcgaagagaagaaatagtactctggccccacaaacaacgcaatccagccaccaaggatctcgcaaaccctatcacccacttccaacggtaaccggacatgcaaaaggacagtgataaaaagagagaccaacgcgcgccacagacggtggtgcggcgtgaagaatctcgatcccggcgttgagggggagagcgaaagggacgaatatagggctaagtgtagagtggacgccagatctcctgattcagcggcagtcacggtcatggtcgtagcctgggaccgggcacggcgttcgttcgcggccacggcgtcaacgcgcactttatcccatacttggcggtacagccgatcccagcgggagaattcggtttcgacgcgcgtggccataaaatcacccgcgcctttgcacattgcttccatggcctcgcaggctgctaccgtaacgaatgtttcttcttggtggtctgggatttcggggttgcgggttgattctgtggatgaagtggcgatgagggatttggaggtttcatttttttgtgacgaggggaagattattcggcttgctactgtcggccagaggtcgtttattagaggaagaaagctcgtttcgttttgggatagggcgggtaggacatcgataaggattgagaggagggagcgtcgaaggtagggagatggtgaggttaggtgggacgggatagatttgacaatgtggaggaggagggcatgggttttgctaagcggcttctcggcatcttctggctctttggggggtgggagtgacggctcgtccgattcggcttggttcagaagctcttcaatggacggctctggaggaggcttgtcgtatgtttctgaccatggctttttggggtgagggattttgccatcagcatctactaattcgtcctcggcatgccgtttggctttgcggttggcaattttcgcggcgatgattgagattgagagattctcgtatcgagacttgcgggtgtcgtgggagccattctctttgctttcctcgattgtgagcaaagagggtttcttcgccccttcctcgacgactgcagctagtgttttgaacatcacctcaacgagtttgggataaccgtgatatagatccaaaataccaaatatagaatcaaccagatcatccagataaggtatcaacggggcaccgcaaagcttgaccatcataaacaggacttgtggcgggtagggtgacacgtcaaatgtattgagtttcaaggctaccgagttcaccaaatagtccacgttctcaatgatcatcgtactcgtgtctgggtagttgcaggcattggtcaagatatttaggcatgtcatggcgtggcgttgaaggttaggattatgtgatgccagcagctgtaaagttgggtagagcgcatctatgagctcaggtcggaaatcctggccaagttgctgagcttggagagccacggattccaaagccagtgctgatatacgccagtcatctgttccatcgactgacagttcgttcagtatatttaatgagatataatacaactcttcaatcatgccgccacggtcagttgatgagacagacgcctcaacatgctcaagacagatgaaatcgtcaaagctggctgttgctgtagtgctgtcccgcaagaaagtcatcgccaaccagaaaggcgcaataacagaatcacttgatgtcgtgtgcatacggttgacaatcgatcgagtgatctcatttccagactcagacaaattcaatctagtaatcattgactgtagatctttgagagtttgttgctggctttggtgttccaaaatgatgggaggaaatagcttcgatctagcgtcggtgttgagcacctcccagttgaagctatcatccattgaggctaacggctggagagcattggtgtttcgcttgacaacggcaccgaggctatcacataggccggatgccaaaccgctggtaagcaaatctgatccagattgaacttgagataggacctgaaagaccgtggagatctgacgaagcccccactgcttagcaatctcatcgtttccttgcatgattcgagggaaagaagtgagccaggtatgcagagattcttttaaacaatccaatactgtggggtatgttgtggcaagatgagttacgttcttaaaggcttcattcgctccctcgtcctctttatctgccagaacaacaaccgtttcaatcatcataggcagagaatctgaaagtgtggtttggcactcttcaattaccatcagggagaggtctaggacggcagactgaacctctggccgttgatggcggcgaacttggataatactggccagcgcgagcttgatctgcgttgtggtggctttcagccaggcttcatccagagctatcttgtcgcttcgcagctcgggcggggagacttccaaggcgacacggtcgttgagaacagctcttaggagccccgagagaatctgcaaggaagtctggaggagcttgtatgacctgcgagtctgtgttgacggccttagaatcttagccagtgccgacacagtccggggcatgatgctggcaagcacaacgcggtccgtaactcgagcataaagtgcttgcaaagccttagcagctgccagggagatctcatctgatctatcatcgacaattccctctagcaggatatatactgtttggtcgacaaccgtcgccgtgccgatctcgtgataaattgtccgttctgggacaggcccttccaagaccgtaaatatagcaccgaggcagtcgaatccagcaatacacagttcttccggaaccttgggcttcggtagttgcttttcttccgtcttgttcggagatccccccacgatcaacgtcaacaggattatgagttgcttgcccatcgcaggagatagcctctgccgccatccatcggcgaccagtattcgcaaacagtggacagcggactctaagcatcgtgtgggtagtctttgtgtttcattgaagatatgcgacaatggaaagaatgcatattcagcgagcttctcgtcgagcgtattgttccccgcaagttcctttaaacagttgtgtaccggctcaagggctcggagtatgtcggcagcggaagcttgatttcctcggaaacggaggcccacggagctgagttcaatgcatggtgctcgaagctattcagaaatcagcattggtcgtcctaagagccgaagaagcatatcgtacctgcttgaaagattcctgccggaggttttccattgcagccgaacaaggtcggacggcgtcagagttgcaagaaagtaggctaagtgttgagtagtatcaaatcagtagtgcgccatggaacaccgtctagcagagccatcgtgatcgaactgcatccccaagctgcaccgctctgtcatctgccggcataataataaagcggtgagtgtaatctatcccaaacgggcaagatagcactgcacgtgatacgttagcgcgtctcaacgcgtgggaaacccgacagctgcctgcgacacagagtaactagccactgttgccttggctatttccattgcggttcttgtctgctcggggtatttattgagccgtatttcgtgcccatttgacttcgacagaaacttctatgcgggtgttgcgaattcgagagcttgcgctgttatcgctctcacgctcgcgaccaagcttctacatacgatctgcaggacaacacaattccttgaccacatcaattgccaagctatctacggtcttgttatatgccagtagtatagctcaccaaaatcctactttgaagaaaacagcatcctcacaaccgcgaatcatggccgatgacaagagcaggaaacaggctaccctggggtatgtacgggatggccagcaaacgattgggtgcgtcgacaatattcgatggcgcatgcgccctcttaatctgacctattttgactcttattttcattcactcggctaattcgttgtgtttgtcttgtaggaggttcttcggttcgggcgccaaccaaccgccgaaaaagcagaccacattagcttttggcggaaagagacaagcagcaagcagtaatgccgctgatactgagctcacggataacaccaatggatttaaggtggaggacgctagcaattcagcaccaactgcagagccaacgaagggcgtgaagcgggaaaaaagccccgaggcggaagaaagcgatggttctgatattcagcctgtctctaagaggcgacgaaaggcttcgtcgaagagctctcccgctgctaagaaacaatcggcatccccggagaagcctgagtctataaagccaaaagttgaatcgccatcaccaaaaccagcaatgaaaaagctctccgatgttactcctgaagagaagtcaccttcagtagtagaagacgaggacccactggaaagcgaagatgaagatgacctcaagccggagctcacgaggaaatcaatcgaaaagttccaagcaaaaatacaagccagtggtaaagatccatacccagactgggaagcaggcactcctgttccctatgctgcgttatgtaccacattctctctagtagagatgaccaggaagcgtttggaaatcacagaccattgttctcttttccttcgccaggttcttcgcctgacccctgccgatttcctacccactgttcaactgatgattaataaacttgctgccgattatgccggagttgaactgggcatcggggagtcactcatcatgaaagctattggtgaatgtaccggccgcagtcttgccgtcatcaaagccgatcaacgggaaatcggagacctgggactggtcgctgccaaaagtcggtcaaaccagcctaccatgttcaagcccaagcctttgactgttcggggtgtacacgaaggtcttcttggaattgccaaggtccagggtcatggatctcaggacaaaaagatttcaggcatcaagaaactgctgtctgcagccgatgccgacactgctggcaagggaggcaaaggggtggatatcaccaaggacaagggtggtcccagcgaagccaaatttatcgttcgctttttagaaggtaaactgagattgggactcgcagagaagacagttcttgtcgctgtctctcgggcagtccagattcacgaggctgagtcaaccggaaataaaattccttcgacagagcaaatggccgccggtgaaaacatcttcaaaactgtttacagcgagcttcctgcctatgaagtgatcattcctgccgttcttgagcatggtctctttaagttgcctgaagtgtgcaagctttctcccggaattcctatcaagcctatgcttgccaaaccgacaaagtctatcaccgaggtccttgaccgttttgaagggaaggaattcacttgcgaatacaagtacgatggagaaagagcacaaatccattttgtatctccagattctatgcaccagtatcctggagccttggaaacattgcagaaagacagcaaggggctgtcctcaatattttcccgcaactcggaagatctttcaaagaagtatcccgatgttttaggcaagcttggcacttgggtcaaagctgacgttaagagctttgttctggattgcgagactgtcgcatgggataccgaagccaaaaaggttcttccattccagcaactgatgacccgcaagcgcaaggatgtcaaagcggaagatgtcaaggtcaaggtctgcgtgtacgcctttgatctgcttttcttcaatggagaggtaagactattattctatttgatgtctatataagagcgattcgctggatcactcttcctctcttctccttcctcacgattcggtgttctttcgcgtttatggtgaggatgatgagagagaaaggaggcacaccgagtcgctttgggctacatttctagttattctcgctaacttttcgacagccctgcgtcaagaagtctctacgagaaaggcgagagcttatgcatgagtgcttccaaccgattgagggggagttccagtttgcccagtatggcaactctaatgttctcgatgagatccaagaattgctcgaggctagtgttaaggcatcttgtgaaggtcttatggtgaagatgctagacacagcagagagtggctacgagccaagcaagcggagccgcaactggctgaaggtatggtgcctctgtttgttggttatttcaaccgtgctaacttatacaaaggtcaaaaaagattacctcgccggtgttggtgactctcttgatcttgttgtactcggggcctactatggtcgtggaaagcgtacttcggtttacggtgctttccttctcgctgcctacaaccccaacaacgacacatatgagactatctgtaacatcggcactggcttctctgaggtgctacttgaagagctacatcagacgttagttcctctggtaattgaccgcccaaagccattttacactcactcggccgtccccaaggaccaaccggatgtttggtttgagccaagactggtgtgggaagtcaaaactgcggatttgaccctcagcccacgctaccaagccgctgccgatgagttccaaggaacaaccggaggtggaaagggtgtatctctgcgtttcccgcgatatatgaaatcccgcgacgataagaagccagacgaggctactaccacccgtgccgtggcagagatgtatcggaaacaagaagcagtcaccaaggacactactagcaagggaggtgtggatgatgactttgaatattgaaacgatattgtcagacgcactatagcgaatgtagttaaattcatttggtattgatattaaggccttgacaagtcgtacgcattttctagaatggcaccattgcttagatgggtgcatcatcacggggcaatgacaactggttggcaccaatttatcaattcacttttaatccaactattcctttctaagacaaagcccctgctgatcggcatccaatatcatgactttattctacaggtaatcccggctatcagcgggctatcagcggactccgcgatgcttggcgctgcaagccaagcagccggaccctgctcgggccctgagtcgacctgcgcccgcctttctttgtccgcagcacgtcttgccagtgccttggaagtaactgatagcacgaaataacatcatgcatatctttcttggcaccgaggaatgtaacatgcccccctcgacgctccgccatggctactactagctcacaacgcgtgtggagtcgcaacacttatatttcagtgtcggtccggaatgcagcccatctggctctctgcacatttttcttgggctgtgtggttacatacttcattgtcgatatgcgcgtgtttcaattgacgacggccattgggtcgatcatcgtttctgcggcagctcttactcccgagtcagtgctggtctcgcccgattcattcgttgtacctattggttggtagctgattttttttttgtagacagcttatcgcggctccaagacgcggtgaggctattcccaacccatcaggggtaagttgcacaattgtatgtagatatcgacaatgttattgacctaacataggaagttgcactcttttccacctctgaatactccttcgagacccatgctacatcgtcatggtggagtctgctggatctggagactgggaaagtgacacagcttaccaatgacagcaatgtctccgaattgatttggctagggtctactgactcgggtctcttatatatcaacggcacgaacgccgagattcccggaggtaccgagatttgggtgtcagatacctctaatttcgccaactcgtgggtttgtctatgacatgtttgaatgaaacgttaataacttctgtgcagtgcctacaaggcagcttcactgccggcgccgctttctggcctcaagacggccattaccaagtctggagatattaacttcttggtgtatggagagtcctactctaatggcactgcgtacaatgcagagcttgctgccacgcccctaagctcggcgcgtatctacgatagtatttacgtccgccactgggatacctggctcacgacgagattcaatgctatcttctcggggactctgaagaagaaacgagccggacacggagcgacatcccgctacatctctagtggatctctcaagaacctcgtcgcaggagtgaagaatcttgagtcaccctacccaccattcggcgattcatctgactatgacatctccgctaacgggaaattggttgcattcaagagcaaggcgcctgaattgccacgtgcaaacaacactgcttcatatatctatcttgtgccccatgatggatctaaaaaggccgtggctattaacggtccaaacagtcctggtacaccgaacgacatcaagggtgattcgagtagtcctgtcttttccccagatggccgtcacattgcatatctccaaatggaagacatctcctacgagtcggaccgtcgcattgtctacgtttataccattggctccaagaatactattcgtacattggccaggaattgggaccggtctcctggtgcaataaagtggactgctgatggtgaaaacctagttctgaacaccgaggactctgcacgttctcggcttttcttgctgcccgccaatgctggtagtgatttcgagccgaagaacttcaccgacggtggcgcagtggctgcttactatggcctgcctaatggagactatttggtttctagttccgctatctatactagccgcacagtttataccgcgaagcctggcaaaggtatcacgggtgttatcttctccgccaatgaagttgacccggccctgaagagccttggtcaatcagacgttgatgagttctactataggggcaactggacagatgtaagtctaccgttttttcatggaactgaagagatattaacattgtagattcattcctggatcatctatccctcgaactttgacaagtcgaagtcttacccgcttctattctttattcacggtggtcctcaaggttcatggggtgactcctggagcactcggtggaactacaaggtcttcgccgaccaaggatatgtggttgtcgcgcccaatccgactggtagcactggatttggtgataaacttacagatgcgatcgcgaacaattggggtatgccattctcatcactcattttcattctcgccttctaatgatcaacaggcagctacccttacgatgacttggttaaatgttgggagtatgtccgggacaacttcgactttattgataccgaccgcggagtggcagctggcgccagctacggtggcttcatgatcaactggatccagggtaatcccctaggtcgcgagttcaaggcactggctagtcacgatggcacatttgtcgccgacgcaaagatctcgactgaggaattatggtttatggagcatgaggtatgtatcttattcgtggtattttcattgttcttatgctaactcttcaaaagttcaatggcacgttctgggacaaccgagacaactaccgtcgatgggatccatcggctccagagcacattaagcaattcgccaccccacagctcattatccacagtgatttggactatcgacttcccatctctgagggtctggcactgttcaatgtcttgcaggagcgaggtgttccaagccggctgcttagtttccccgatgaaaatcattggtaagtataatggagacctttgggtggatgggatgtatcatcgcagagtcatagaactaattatattgcattcaaatagggtcatcaacaaggaaaatagtctcgtctggcatcaacaggtcttgggatggctcaatcagtactctgggattcgcacccctggcgctgtcagtttgaatgacacagaaatccctgttgtggattataatcctcagttttaggctcgtttgctgcaaacgacggccttctgcatgccatgtctcagatggcttgtttcgtagctatctcttttttcgcagttctatgctgtgtccaacttctatacatgaacaatggaatcatcacaatataacctctttttttcttatgccttgtgttctacctcgtggaatctgccggttactagcagcgaatatagaaaatccccagttgcctacaaacggctctcaccgtagcaaacgaaatacccctcaaaagcatccttctcccacaaaatttcgtcttctttgctatctctgagtttcatcaaaatcctttcctacttatcaaccatcatgcctcccaaaccttccacccgtaagggcgtcaagaagggtatgtcccatgctttgtcccctcatctatcatcatcgcccattagaaataagcaaaaacgcatacactcggctatcctagagagagctaacaaaagctccctgtcagaaatgcctaagacggagccctctactggaacccattccccaagtgagtactggaatcagcttacagaccttcaactggctttcttcgatgatgctacacaattcagggtttctaatccttacgtctttggtacagagatcaaagctgaggtgtcttctcccactcccgcttttttcgccaatgatgggaacgagagtgagtacaattttgacatgactcctgtctcaggcccaatctcgtacctactgccatataccgaggattattttaccttatgtcatgctcccactgccgatgccactggctaccctatctttgtttcccgaaatggccgctgggactggttttatctaacaacaagactacagagtctcccgctatccccgccaatgatacaacgaacttgaatacaaggaacacaaaaagtgagtttctcgataatctcagtcttttcccaaatctatttagatgtactaagggcgacttcaccttgtatccttatcccaagcctggtctcaattccgccaacactcccacgttctcttctcaaaacggatgttgggaatagatctttctcctatctaacacggatacagagtcgtcccctctcagtgtcaaaatggaggatatccccgaggccaatccgaggatccagcgaccgagcaatcccgtctccagcacattctctgacaacctgggccacttgatcttcacacgcggtgtccccgacagcgacgatgatatctcatcggtaccctcgctagttgaaaacatagccgagcaagccaggaccgcgaagcatgtggggttcttcatgaacacttcccacaacaaacacttcatccccattgaagtaccctccctccttggaaacgagaactgggaatactggttggccgccatgctcttactcttccgccaacactcggtgtggcctattgtgactgcggagcttcagccactatcccctagtcacaatctgtacctatggtaccagcgcatgcgcgattgtgcaatcgagctaatatatgccaacgtctccgaggaggttcgcaagactccttgtttcatcagcaccgtgcacgacgatgatccgaatgttttgatgcgccacctgtacgctcactatgcctcacctgattcggatcactctgatgacgagtctgagcttgattagtgtagtgattggtgtttggcaagaattttcgtgttttccactgctccagggttccctgatatctaagcaagggaatattttgcccgtttcatccaaatctttcaatatctgatgtttggtgctattttatttgcaggtacaactttttgtcttaatagattatttagtggttttcctattgctagttcagtgttcttctactacattcataagtgcgaattacacgaaatttggaagcagtacagacattctctcagcaatgacaatagtagtgggcattaccgttcaattcaatggagttctagtagtaagtgtgtatataagaagaacccccaagaaaagctctagggtgtacttgatgatgcttccctttgccttcatatatcgaaatttttttctacgtctgtgtctatctacctttctctaacaagacaaatgattatgaacttacaatatgatatatatttatgggaaaccatagcacgacatcccaaatcccgatctagaacccatttagattcttctgcgctgtaataacatcccccttatccacaaagtccactagcagcacattcggcgcattcccatacaacttagcgcatagtcccgcctgagcaccaatacacccaggcccggttgcagtattagtagtgtctgccttgtggcgagctggaatctttatgccgaaaatatcgacatcaaggaagtggttgacaatgcccatacggcctgtagcagcggtatcagagggtcggtcgatgctgcagtttgagaaaaaggagtctgtgacgtcataggctgtctcgaagtagtaggcgaactcgtcttgaatgaagttcacttttgtagtatcagcaccgtagtctgaaaattgttagtcgaggtatagcctatctctttgtgattggtgctttttacccaggaataccaccaatctctttcctctggatatcatgtcacccagtgtgggccagtctgatattaatagcggatttgcgaagggaacgtaggcgtagttatcaatcccgctgccggagaaagtgtctccaaattcggtgattgctattgagtcgccgttcgtcaagagaagactaacaacttcattcgggtttgtatccagccagttttttatagtcgtcaagaatgatttgagtgttcctgcatcttcgagcaagcatgaggtatggcacagctctatgatgttcccgtcaaggatggagcggtgtgtttgcacttgcagataccggattcccatgtcaagttgggcttttatatcgatgttttggttctgctggggtaagggtccgacaaaggcagagtcgtgggagcctacgaatgtgatattcgagtaggaccgggtgcagtactctgagcggccattacaggttgtcacagctaggtttgacatcgaaggagtggtcgaggagattactgaaggctcagatgctcgcggtactagtattcctggttctgacactgcaagcacaggctgaagtagcaagagagtactcagcattgtacatctcaatttctggtggattttggtcatcgtgttcaaggtcgctttggactatacttgactctgagcgagaaggcgcgctgtttcgccttttattccaagacttctttcttgtcttagcagacaccgtgattcataactactgtccccggtcatgcaggagcaacagctgcccccgcgagatgattatcagctgcccctgcaaaagtggtatgctcatgcctattcctacatacactccacatgccggtccatgaccaaacgagaaccctaaagcaaaaagaaaagaaaccgaaactgactataatcacgtcgatacctccagtgatagagtagcagaacatgaccataaatatcccagtctcctcgtgaccgcagtcatgcaccaataaacggccccagcgtgtgcgccagatatttgatcttagagaattctctgtaaacacaagcgatttgagatatgacaggaaacttgttacattatatctcgctaatacctgctttacaggtaagggtaggttcagacgatagtacgacagacttcagtacacatcgataatcgctgcttggatgggactggcctcattgcataatcgatggaaattagatacctgtaaagataatatcgaggttcatagtcattaacataggccaatgctcgatgatttatatggtgttgcgaagagcaaatatcccacgttatactataactaccccgtcacattcagaattaattaattcatttatagtcttcgacatacctttggcactactgagtctttccttcttctcgtttttattcttaccagtctgacacatttgcttcccgatatcggattcagcgccatcaggctgtgctagatagccacacaacgtttccccttgaacatacaaatggccattggcaaatcgaattaagttatgtgcctttgaagattacatggtattatgctgtttgtctttttgggcccttcatatcgtatcactgtcttaacaccgcttgttgggaatcgccgattgacgtgatgttgtagagaatcagagattatgttcatgcagtactccgcacggagtaccgatcaggttcaattgtaatagaaattatctcatcatgcagatgtacaggaaagctagaatgcactagcacataattagagatgttcaccgtggaaaatattcgaagggcactagacgtacgtcggggtatatcggcaatgctatcgcggtcgcccaaagcatgtgtgatggctcttcgcatcctccgtctgatgccttacaaaatattcatgtgccaaagcctctcagtttggtagggccgaaagatatctggcggacctgcaacgttgcccaggctcttcaagaagcatcgggacatatagacaagcagtatacacagggcgcgatcgcaacaatgccccgcgaacgtgattggggttcattcggacctgggtggggggtgaattttcttgtatctgatatcaaatcagcatcgccttatatgaactttgggccactcggggaccttcagttgttcgaccttcgtttcaatacagctgctggcttttgttggatactccctaaccttccgtcggattccgcgtcgtcatatccatgctggagattgagatggattttggaacgggcggcaacggagtatctatcgagggaccccctcttccagtgggcttcaactcctagtacaacctctagacacgccaaattctaggccagttgagctgttatttttcgggttatattagttagattttgacatattacgatatagggccagtttttgttttcaacgaatttatactcttttcgggaaagcttctgtgtttaagtactttacatactcttcatcagcatgtatgatgtgagataagcacgtgtatatgaaaggctatcaagcttgtgcataccccatatctgcttttcgtatgactataaaacagagaatcaagatagagactatagtaagatgttccatatatcggtcccaagcagtgtgaaaaaaggtgacacttatcaaaagagctaaatagccgtgataaaatacgagggcactcatttgtagctttcatattgagaaactctcgatatcttcaaggttggttcaatgttgcttgcacaaagatgtgtaaccaccttactactcaaatattcttcgacagttcaaggcagaaaattaccagagaatagattaaagatagagagtccatgtgtcagtgtttttttgactatcattgtccgtacaattgtgaaagcatgaaaagtacctggcagccacttgtggctggtgttcggcccctaagacgggcccgacccagacaacggagctctgaactttcattctccactgtgttcatacccccaagctcgacattccactccttctctctatattgtacctcataattcccctcctgttctccgaaataacattctgatcaattccacgatcgttctctcctaacacgctatcactgattcggcctcgtctccacctaggctgcataacggggagcaatggtcattcggagatttcgctcatgagctcgatggctgagggcagtgagggttggtcgcgcgaagacgagcttgacctaggccacgaaggcgatcaccgacaacccgaccatggtgccctcgatcaaacattaccttccccgcaggaaccagtggaagaggaattggacacgatagacgaagcggggaaccacgattccgagaaaatagcgggacataacgatttcccagaaacccctccgccgcgacacgcggactggaccgcgtcagggagcgcggatggaacagggtcaaaccccgacgattccccatcgctacatgttagtggtacaattggcgcataacctggatagctagctgattgacggcagggctctcttcagtcctctctggatagcagtgctctcgcgctccgcggatctccgcgagtcagcccaagcccggctcgtcgcccctttgaccttcgctttcagtcccgattatcttcatcgccgcaaagtttatctagagccggctcgccattcctagcgcatcttcactccagacagtcttcaataaccagccaggtctccccgaccccagaaacagaagccgaaccgctccaggggccttgggatgtggtgcgatggacaaagcttcggaaaatcactgggcaagcgttttctgaaatcgggaagcgcaatttcggacgaccaacttgccttgcagtctccacgtcgattgtaataggtacatccaagggtattattctcgtgtttgactatcagcaaagtctgaagactattattggaacgggcacaccaggtttgtcaaaagacgtgtacacctctggcgcattgtactgatgatttacctagctgttgaatgcggtgctgtcacatcactggcactttccgccgaccactctaccgttgcaggggggcatgactctggcgatatcttcacctgggagatttcgcgctcggcaaagcctttccttcatatcccgccaattccggccaatcaagtcgagactcgaatatccgatggccatctttcaggttctgcagtcattcatatcggctttctcggcaccaggcgaaccgcgctggtctcggctgacacacggggcatgtcgttctcacacctggcaacaagagggatgggtgcagtggggagaacagtcaagacgactcgaattctgggtcgatatcctcaggcaacggcagatatcatgcggcgtaagcctagctctgttcttgctttctctcctctgccactcggcaacgtagagcaatccactgattcgttgggcctcgttgctatgctgacaccctatcttcttgttattgtgtccaccacacccgtggcacaaacccaacacaaagcaccgagaccaaaggaagttcccgctcacagtgccatgaccggcgccttggcatggtttccggcaattcgactgaagggcaaagacacccaaacttcaaacacaaaacttgtctactgctggtcaaatgtgctgaccgtgctcgaagtctcagaagccgagtcagacgaacctgcaaacaaggacaaaccccccagtcttgtcttcagagcgcgcagcagatggagagcagatgaagccattgtggctgttcagtggctcagtcgctcggtactcgcagtcttcacaataacgcagcggctgctaattatcgaggattattccatgcatgtgaccgactcggtcgatctcgccaacagacatatatatcacaccgatctcttctcgtcgcaactccattcactggttgaacagtttgacgaagaggacgagtcgatgcacggagtggtagcagatgcattccatatgagttttcgttcttataaagggcgcttgttcttgcttggttataatgaagccttggtgggcaatctctcaaattgggccgatcgcttgctggcgcttatggaggctggtgacttcattggggccattcgactagcaacctcgtactatacgggagagtcagaaaagctgacggttgggcttcctgaagaggatgttttgagacagcccattgtgcaagaaaggcttttggaaatgatttccgcctccctcaagtatgcttttggtcgaaattacgaagcaagcaacggccgactggagaaccagcagctagaggagctagccgatgtttctatcgcggcttgtatctacatggctgacgaagagttcctctgggaagaagtcttcaactggtatgaggagcaagattcggcgggcattttcctggatgcactcgaaccgcgtatcattgatgggactctgcgatcactacccccgaccgcggtcaaggccttgatcaaccatttcattggaactcactcgaccggtcgattggaggagatcatctgccttcttgacacgactacgatggacatcgatcaagtcacaacgctgtgtaagcagcacaatctttacgacgcctttatatatgtatggaaccgctgtctaatggattatgtgggtcccctagaagagctactacatctgattccctcacaatccgagcccttggccaacggcgactatgtgattgaaatgagacggcagaacaatgcgatgaaaatgttcccctatttgtcatttatcttaacgggtcgcatctatcccaccggtgaggacatggatgaggctgaagccatgcgagccaaaacagatttgtaccaattcctcttctcgggtcgtgcgtccggtacggtacctagagacaccagcggggcagactccttctctcaacttcgagccatgctcaagtttgacgcttccagcttcatgagcatgctcaatgaagcattcgaggatagcttcctaaatgagcccgagagcgaggatgtctccgcgtccggcatgttaatcaatcgacagtacctcatcagcattttgctccaagtcatgaccgccgattttttcacgccttttgataccatataccttgatatgtttgttgcgcgcaatctgccaaaatatccacagtatattctcctttctggcacaactctccaccaggttctggtccgtgtatgccaatatcccgatcaggaaatggcagacgattgcgaattgagtgcagaatatctgctgtctttttaccacccaccggacatccagagcatgattcctctattcaaggaggcacgattcttccggattctcaagtcggtctaccgtctagagaagcaatatcctctgttggtcatgacttacctagaggatccaagtgatcgcgatgctatcttcacttgtctgcatgactgcctccgtccaggctctgggcttggaaaaaaacagagacgcggtatcgtggatgtggtcaaggagcatgcccgggagatcgcttcgattgacgtgacgcacgctgcacagacgatgcaagacctggcccctgaaacacactctacgtttttgcgggttttgcaagatgatccccagcaacagtaccagtacttgctggtgctcatcgagccgcaggctcagaccgcggacacccaatcttcgcccaatattgagaactggatgatcgagcgatatgtgcagctcttgtgcaaatataacccctctcatgtggcggacttcgtcgacggattgcgagtcggtgacatccgcttagatgaactactcccgtttattgaggaaagcggagctatcgatgctgccgtcattctcctcgcccgacagggtcaagtccgcgaggcccttgaccgtcttgtcgcacacctgaacaccctcgaatccggtctggtaggcatcctccagagcgtgcgcgagagccccgactcagcgactaccgccgaggcaatcgacgacctcatggagtctctgaacaagtatgcaggtgtcggaacgtggctctgtcagggccaaagtaagacagtcaagcagtcgcgcacaagcagcgccaacggcaaacgcaacgcgccaactctcgatcaacctctaacgtttgaagaactcctttggctcgaccacattgaagccgttgtgcgcatcgcaagcaacgtcttcgccttcatacaaggaaacaacccccaaatagcccttcccacccaaccaaccacatccctcaccggcgaaagcggccgcctaacaacctcattccgcaccctcgtccagcaagtcttcacagctctcctagcaagcacagtaaaaagcagcccagccacaaccgaaagaacagacatgtccttcttacgcatcctgcgcgcattcctgagtcgcgccgcaacctggtcgccctcactcctcgagctgcgcgccgtgctagcatccatcttttccgcctactcttacgagaaatccctgctgaccctcgcaaacggcatgttggaccgcgacctcttcgtccacgtcgacgaagtcacccgtctacgccagcacggctggcggccccgtggccacacctgcgagctctgccgccgtcgcatctggggcccgagtgttggtgacgcgcattggtccgcatgggaagcgcgacgcgccgatgcctattcccaccgcatcgcgagacgcaatgaggatagctatgacccgtccgagcgcgggaagggcaaggctgctgatgtcggagtcggccatccgtcccgtctggatgcggggcgtgcgcatgcgcatactcatagcgctcgcgctggtggtatctccgatgcgaatgctgaccatgatcgtgaccatgaccacgaccacgccgaggatggagctggatctagcaccgtgactacagtcatagccagtaccccagaacccattgtgattttcgcctgtcgacacctctaccaccgacgctgcgtgctggacgccgtcagcgcgggggcccgacccgctgaaaccgcgtttcggcgcgaccatttgcccgactggtcaggggccgagctgttctgcccagcctgtacatagttttcgggggacaccgggaatgattatttcctttgtgtctaggggtattcttttgttactttttttttctatctctttgtttttgcctactttagatgctgttcggggaatatccctagatgaggatcatcttgtcttgcatatagccattctccttctttttatcccccactctttgtaactcccaactgaccgtaatataatgtgctattaaagccaggtctatccctgtcatagtcatccgtgctagtcttgtctgtcttccgtcggaacaggtgatacgaatggtgatgttctttgcttcagctgttcagctcatttcccacatgcgctcagctgtactctcaatgtgatcgaataaaaatttctactctgattattgttcggtcccgctgcaggggttcgcgggaacactgatatggcacggcttttcttccaggtggattctatgattgtgttattttgatccagagggtccaatgctctttgcttttggtagtgatctacaatagatggtgtatagggccgggatgaatcttggaatgacactgtcattttactgctgtgtttgatatcagttttgggtaggatctccgtgagcactgatcatgtaccgggggatacatgaaaatatgtacttccactggtatatctgtatgtgttggtacttgtgtctaagtacctcaaaatggccagagagacctggtgatgttcacgaattccacctgagtccgccacttcatttttaattcctcagattctcgatctgactcttcacttgctgaagaattgcctgacaaaaattcccggtaacaaagaaagaaaagcccaaaaaggcttgatggccgagagtcttcaaacagctgttgacctatcatcttccttctcttccctttactactacatatgcaaaccttagatgttggcggtactcactctgattggtcgtggatagttacattactggtttgatctatatgtctctcctttctttctccaaatccgaaacatttaaggttggtgtttagcgcttgagatatccatggatccgatacggttgaaggtgaatacactactatattgtgtacccgtgaacattgtacgttgttgcttgctatcctaccctgaatgtcaatctgagcacattacagaatagaccggttcaatcggcaagatcgaaatgatctactgacagcattgatacagggctcggaggtgtcagactgattagatgtttcaacatgccccctttaaccgcatatcttcgattagagtgtctggtggatgtatcacgctgctccattcttttttctgtttttcttttttcttttttcctgtttaccattttcttcctggggagagtggaggcgtctgaagtataaaggtggtccctctccctgtataaagcatcgatcaatctgtagtccattgtgcatgttattgtgcctaggcctattgtccctctctattgtgattttgtattcattcctttccttctattgtttcttgccattgtgatcagtatctgggatactagatctttcccagtctttgacagactctctctttccaatccctctttctcctcacaaacatcctacaaaccccctatcatttaagcataatgcagctattctcagcccttctgcccactgtgggcttgttagcgcaggtatcttccgctgcatacaccctacgcgatgactatggtaccaccgactcgttttttgacaagttcaacttctacacggtatgtctatcagcattggtcccgactttttgcctcataataaactcatcttatatataggacactgaccccactaatggttttgtgagctatgtcgaccggaacaccgcatcgggcaatggtctcctcgacacgagcaacggcatctacatcggcgttgaccactccaacaccgccagtacgcctggccgccagagcgtccgcctggaaagtaccactacctacaaacatggtcttgttattctcgatctggcacatatgcctagcagcacatgtggcacctggcccgccttgtgagaaccccagccgcaatccctttttattaatcagacaaggaaataagaaaaagaaaatcgctaacaccctccagctggatgctcggttctaactggcccaataacggcgaaatcgacataatcgaaggcgtaaatgagcaaacccaaaatcaaatggccctgcacaccagcgacggctgcactatcaacaacggcggcttcacaggaaccctcgacacagcgaactgttacgtccaagccagcggccaatcctcaaatagtggctgctcaatccaaagcgacagcacccagtcctacggcacaggcttcaacaacgttggaggcggcgtctacgccaccgaatggaccggctccgccatatcagtctggttcttcccctccaacgccgtgccggctgatatttcatcgggaactccaaacccggcgggctggggcacgcccacagcactcttttccggtggctgcgacatcgactcgcatttcaacgatctgcagatcgtgttcgatattaccttctgtggagactgggcgggctcggtttggggttcgtcgagttgtgccagttatgccgcatcgtgtgtcgacttcgtacagaataatcccacggctttccaggagacatactggagtgtgcggtcgcttaaggtatatcaggacttgactagctccacgagtggtgctgagggtgacgatgaggaggtggatgctgattggaattctacggcgtcgtacgagcgctctgtgcctaggagttctatgaggcatcgccggcagcccaatcatcataggcatggccatgcttagatgctgatgctgatggatggattgttttctgcgttgaaagtgatatgggttcgatctgttttgcatttcgatagtgatcttcgattgtaaatatcccctttttttcagcctgtttcttgattttcgttcatcttacggtctctttactcgtccgggctccgatggtctgtgctggtccacagctgtgggaggacgagcacatttgataggctttattctttattctttatgatgactttatgaatatctcttccatcttgatgatggaatgaaaatgggcaataacaatcatgagcatggttatgctctgtatatatttcttctgagctgtaagtgctgagcagactacgattgatatacaagacaagaatatatacttgaatatatgtaccaactaatagtcatattaacattaagattaacctcacgccccaaacccaagaacatcgcgttgatcatccgtaagccgaccccactccaaaagcaaccggaagaagtagatctccatatcctccttcctcaacgccgtattcgcccacttccgcccttcctccgcaatccacttcccctgctgatcatgcgccttcatgcgcatcttcaggggcgcattaggatcactctcctcggatgcggcagcaggcacgcccgcaaagtatgcaagcgtactccacaggccatggagacggatatcgacaggcacaaagtgcatccatgaggttatacgggagtcgaaccactggcggaacaggcccgttttaaggggcaggctgtggctgtgtaggaaggggaggaagcggccgctgaagcctgcgccatcgaggtcgaagaggaagcggtgcgaccagtgtgcttggaagtctgcccagcctgcggtgcccagctctgcagcttgttcgtcgcagtcgccgcagcggacgattgggtcggcgaggtggacagcggtttggagatgtagctctgcagccggggcgctgccgtccattgtctcgtattggaaggagttctcatttgagtctgctgggaggaggacggagacttggttgttggtgttattgttgattagatgggcgaagcgctggcgtggcatgcctttccattcaccgaagcggctgacgccttctgatgtactgccgagccagtatagagagttctctttctggccatagtccagatccgggtattcgtctgtcggttgatatttcaccttgtcgatgtagttccatgggcttgggaagaggatgtcgttgaacccggtgagagcactttggctgaataccggaatgagttcctgagacaccttgaaggaggccggggagattaggagaccatggaggaaggcaaggtcaggttggtggcagatttcggaggcgaggttgaaatctagggggaattgacccatggaatggggagccacgcatgagagacatatatcacgacggttccagattcgctgagagcgcaccttcgatgacggcgggcagacagcgctcacataagggtcgaaaacacccctccacgctccgtcagtgaatacggtaatgttggtttgatcggccggttcaatcgggtcccagccctcctctcggttgttcgaccatgtctgcaccatgcgctctttggggatcattgcttgcatcccagtctgccggttcagcatcgatattttctcccagggaactgcaacacggggttcatcgttcagattgaataccaagtccatatccgggagatatttggtaaaattcttcatcatgtccgcggcacccgccaccatccacgcatgggtcggttttatgccttcttgcaccatggccgtgccgttgcgaattctgatcccaccgagatcgttgaaagggtttgtggctagctcgtgtgtcattgcacggatgtgctccggagccagggctcgaaagggaagtagatcatggtatatctgatcgaaatcatcgatgataactgacgattgggcagtggcatattgataccattcaccaaagcccctagacaaagattagttgagttgtgcacatgggtattcaaaacttacggtggtggatgctgattatatcgcctctggtattcggtgacagcgtcgccaagagtcttgcttctagacgcctgagcgagatagttgtgatgatgaattccaccatcctttatgaggaactcaatcgggtgtatattatcaaggcgatgctttctcactgcaaaaacgagactgatcccacatagcacggcaaacaatatttgtatggcaacgttggtgcgatataatttcggctcttcgtcatgaaccactcgcgtaagaagaaacaagagggtacctgttaaagatgccgccaacgggagaacagcatgagttagagagataaatgggaagggtgattgtccagtgagagccgataaagaggaaaagtatacgatcatgaaaccgcctataattgacaccccaaggatgtcgaaatgcggcaactaaagaaatcagtattggcagagatgagtatagataattgggaggaccaacaatatgccaggcagacaataccagtattacaaccaacacagactggctgaaagcgccgcgcgaatactctagatccaacattggttgacctgcaagttcaggcgagctatccggtacccagatggatataatactccagaccaaagaaagaccctagaaagatcatcagaaaaaatactccccacacgatcgtactcgtctgcttaccaagagaccagctccaaggaacgttaaagttcgttttctgcgcgcatcatcaaattgagtgccaatccgacatagctcggtaataccgataagtataacagaatcagcaaagaggttgaacagcctatatgatcgtaggtgcgatgcgccatttgatacaataggacagatataggttgaccgggttccagccgagaacgatgaagccaagagcccaccagtcgacaagaatgcggctgcaattaagcctctgaagcggctttgcgtgagataatagaagctccggcgtgaaatggagtatatcacctgtagcggcggcttgtcgaatcgctgggtggggacatatctgtccacttgtcgcgatcgatggttgcgccagtagtcatagagcgaaataacgaaaggaatagtgtactattcatgacgccgtattagtcgcatgagaaattgaatgataaacaatgtattcagccacttacagcgtatccagcaggcgcgcattcagtgtttcgagttacttggcggaaagactcgattcgcaagccacacaaccccaataagagaccgagctttatccaccacgattggacccgtagccgagggcgagtctcgacatcacccagtacaaaagatgaggttgagacgcgggaaggaagctcaaattgttccgcgagagggataacaggccgtttacttgtcggcgaggatggcgccgaccccaatgagatgaaccgactccataccaaaatagtggcccccgtaaggaaacacaccagaactgatgtactaatggggcgatctataccggcgcaacagtcagatcaagttgtaagacattgatatccacggcgacgactcaccaaaagcgtatgtggtattataggaggtagtaaggaatagcgagcttaaaagaaatatgctgcccatataatgcgatcatgagcctaagtctccaacaatgtgagatagcttgctagatactcaccccacacagaccttcaacccgaggtcggaagataactggatcatattgcgccaatcagtttatgatcgttctaaagcgtcccaggccatttctgtgagtccaagaattaattgaacagttgagaggtgacaagacaaagacacctcctgtagatcttcaggagattgacagtgttcgaaacatggaaagaaaaagcagggtaaggagggccaagagggccctttgatccactggcggctaatcagaggcaatccggagtgctgatccattagggttgcgtcaacggacgggttatgatgtatttcacggttggaccttttactgcgcatgtaacgatgggccctgccttgcattgcttgtattctaataaggtatcttgccaatgagtggtggaacatctccagccactatgctcaaatctgttagctcctggtggttagctggtttttacccggagatacattgtattgcaaaagcaggtcagcaagaaatgccgagccattcagcggccagaatcaagccttggtcaacttcacgacccacttgagtcctgagcgtcatgtcgcttgtgcgaccttccaatgcataagctgttgtacttcgtacatcatgttcggctttctaggcagatcctgcaagcagctgtcctatacatcgatgtacttgacgaaggtacacacagccaaggactagaacacgcgtcatattagccaagaacctgtttgttgtaccctgtcggctccattcgcatgtggtgaaataaagatggcccaggcgacccatggttagcgccaaaagagcactcaattaaatttgactaagctcaaagcagttcgtggatttcctagctggatactccacgtcatccatagccacgtgatctgataagggtccaggcggtccactgtctatccaatgaaatgtaaccgcggctagtccgtttcgagcattcgacctcaacatagagtatcccacgtgacttcccaaccccgcaagaccaatcatatgtacatactaaaggccatccgtataacctcttataagggaccttagaaaaatggctttcttattaagcgtctttgttgtatattctcattgactacaacatatgttgtatatgcccgaaaggacgcagggctggtctgcagagctcatcagatatataccgcctacttctttggggtgaccctggcaaatcacagccacgtgacaggatatacttatataatcaagatggaggcggtgtatacctcgggcggtatcagagagcagtatcatttttttagccgctgggaagttttttttggtcgcaagacgaagctaggtgttttttccaatcaacactactcctgaatcgccatgccccgcaaggcgattgactcgcggattcccgctcttattcggaatggtgtgcaggagaagaagcgcagcttcttcgtggttgttggcgaccatgccaaagatgtgatcgtgcatcttcactatatcatgtccagcgtggacgtgaagcagaacaaatcagtactttgggcgtacaagaaagaccttcttggctttacgagtcaccggaagaagcgcgaaatgaagattaagaaggaggtcaagcgtggcattcgcgaaccgaaccaagaagacccattcgaacttttcatcaccctcaaccagatccgctatgtatactacaaggaaaccgagaagattttgggtaacacctatggcatgtgtgtgttacaggacttcgaggccatgactcccaatttgcttgcacgaaccgtcgagaccgtcgagggtggaggtttggtcatcctgcttttgaagagcatgaccagtttgaagcaactttataccatgtccatggatattcactcgcgataccgaacagaagcacacgatgatgttgtagctcgattcaacgagcgattcatcctgtccctcggaagctgcgattcgtgtctggtggtcgacgacgagttgaacgtgttgcccatctccggcggcaagaccgtgaagcccctcccggcccccgaaacaacggacgagtcagcttttggcacgaagaaggaattgaaggaaatcaaggagagcttggcagactcgaagcccgtgggccctctgctcaacttggctcgcaccgtggatcaagcgaaggcgcttctgacctttgttgatgcaatcgctgaaaagacgctgaagagcactgttacactgactgccggtcgtggacgaggaaagtccgccgctctcggtgtcgccatcgccgcggctgtcgctcacggctacagcaacatcttcatcacttctcccagtccagagaacttgaagacactcttcgagttcattttcaagggctttgatgcacttggatatctcgaccatgttgactacaccatcttgcagtcgacaaatcccgacttcaacaaggctgtcgtgcgcgtgaacattcaccgcaatcaccgtcaaaccatccagtacatccagcctcaggatgcgcaagtcttaggacaggcagagcttctcgttatcgatgaggctgcagctatccctctaccattggtgcgcaagctgatggggccttacctggtgttcatgtcctccactattaatggatacgaaggtacgggccggtccctatctctgaagttgattcagcaactgcgggaacaatctcgaagtggagtcaagacagacgacaccgacgtcgccgaccgcagcacaggcaagtcagccaagggtgccgacaagaacctgagcggccgaaccttgagagaaatcactcttacagagcccattcgatatgccccaggtgattctgtcgagaaatggctgaataaggtcctctgccttgacgcaactcttcccaagtcgcacatgaacacacaaggctgccctcacccctcgcagtgccagctgcttcaggtcaaccgtgataccctattctccttccaccctgtctccgagaagttcttgcagcagatgatggcgctctatgttgccagtcattacaagaacacacctaacgaccttcagcttatgagtgacgcacccgctcatcaactctatgtgctcgtcccgcctattgatgagggggccaccaagcttcccgagccactttgcgtcattcaggtcgctctcgagggtcgcatcagtcgccaaagtgttctcaacagtttgagccgtggccagcgtgcaggaggtgatctcattccctggttggtcagccagcagttccaggatgagaacttcgccagtctctcgggtgctcgtgttgtccgtatagcgactaaccccgagtatgtgggtatgggatacggttcccgagctatggagcttctggtcgacttcttcgagggcaagttcaccaatttggaggaggaggccactaccgccgaagagcaaatggtccgtgttacggacgaagagctcgccggttctagcctcttggatgacaacgtccatgtccgagacattcgctccatgcccccgctattcggcaagctgaccgaacgtcgccctgatgtccttgactacattggtgtcagctacggtcttaccccatccctccacaagttctggaagcgcggttcttttgtcccggtgtatcttcgtcagacccccaacgatctcacaggagagcactcttgcgtgatggttcgcaccctctccactggcgagactgacgacgcctggttgagcgcctacgcgcgcgacttccacaagcgattcctctctctgatgtcctaccaattcgggcagttcccgtctgtcctctccctcagcatctgcgagtctgccaactccggtgccaagaaggacccgaagtttaagccgcgcgtgctacagaaatccgacctcgatgccgctttctcgccctttgatctcaagcgtctggatagctacgccaacaacctcttagactaccacgtcatcctggacctggtccctactctctccgactactactttggaaaccgtctcgatggcaaggtcagcctctccggcgtgcagcaatccattctcctcgccatcggtttgcagcacaagaacctcgacgaccttgagaaggagctgaacctcccctcctcccagctccttgctatgttcctcaagattgtccgcaagatttccacccacttccgcaatctcatcgagaacgatatcgagcaatctctgcccgcacagaaggttcgtatcgagacctctgccgctcacgacgatgagcccgaagtcaaccttcagcctctgcccatcagtctggaggatgagcttcttgaaggaggtaaacagatcgataaggagatgctcgccaaacagcgcgctctgagcgcatctaatccgtaagttttaatcgctttgtctgcctatcgaaacaacaataactgatttccagcccacagtgatggacctgacagttccaagtcctctaagcgcaagaaggtcgagactgcgcgcgatatatacgacaaggagattgactcgaagagacaaaagatgatcaagaagggcaccgagggccgcaaaaagcgctgaattatttgggttctgaccagttttctttttgcattaatgtacggtgttcggtttcttgggtctaaaaagacttgcttgtgtctagtatttgtctgtattcttcaaggttcatgttttcacaggatatccgtctcttgtacatacatatgaatcatgtttattatgcctacaatgagttgattgttcctagagatagacgtaatattccttaaccgcttgatacataagcttatgcgattcgctctcaaatttttgaatactagatagaggtcatcagactagcattgaccacttccggggactgagataatcacagctcatcatgctccacggcctgttcgtcggcctcaggcttaggttcagcatcagcttcgactgtctcagcatcaggttcaacctcagcttccgcctcaggcttaacctcagcctcatcactgaccacaataccctcaggcaacttctctttagcaccctcacccaaccgaatggcatcaacccaagactcaatagcgacagccccaaagtccgcatcggcgccactgaaccgacgccaccatccgcgacgcgcattcaacgcgataatttcaaccgtctggccgtcagctaacgccaatgcctcacgcagagtcttagacctggtgttgatagcagggacggcatagagcgggaagaggtgcgttccgcgctgggcgtgcttgtgaccgatctcagctaggcttgcgagcgcctcggtggcaggcgctggaagcgcggcgtcaggctcgctcgcctcagggagaatgactagcacacaggtgccggactttgatgcgagacaggctgagtcgagggattcgggggtagagagggttggaattgggggtgcggggatagggacttgaatcggcttggcggaggggtctgttgtgtcctggttctcggaggcggtgggtttgaggtcctcggcatcgtcgacgatggaggtaggcttggaagcgggcttggacttcggtttcgacttgggcttggagtcggacgcggagcggggggacgcgtcggggttgggtgttgccgcttggctcaggaattctgtgattggcttcttcttcaagtcgccggtgtagattttgtgctcagtatcagcgctggggacgaggacaagcgtcgggaactcggttacgccgaacttcttcacggaggcggattctttgttccgtacttgggcgatgtcaattgcaccgaggaagtcaactgccagagcacggatcagagcaccagttgtacccttctctgtgaagaggatggccttgggccggtcctcgttttgtccaagccatttgtccaagtccttgtctgttgcgcgcttcacgtggttggggatgcggtcgacgactgcgtcgacgatacctttcgcgctgcgcgcaccttggtagtcctcaacacggggcttcccgggcttcttggaaggtgtcactattttcaaggtcgggaagccctggacacccatctgtccgcagaaggctttgttttcgtcatcgtcgcagttgatcgcggcgacttttgcgagtccgtcaaggtttttcgcggctttttcgaatgcgggtttgaggttcttgcaatggccgcaccaaggcgcgtagaatctaagtggaaaaggtgagtgaaggtcggagggtggaggcagagagctagatagcttgagtgcgggagaagcttactcgacgatctatgcaactattagtcgattttgcgcatttaggaagaccataggcactcaccgaggtataattcgaatttgcaataagcgagttgtaggttttaggattcaactggatcaccggcgaattcttggtgtatagtccatcggcgttaacaggcaatgccgcaaggagcgacgtgacaagcaaaagactggcactgtgcagcataattggtgatttggcagcaggtatgaaactcagcaaagaagccaaagaagccaaagaggaataaagaaaagacagatggtccgaagtattaacgcaaggtgtcctgaagctcttggcatgcggaggattactaggtactccgtcctgaagatattcgagtagcaaatatctcactcaatatgcatgctgtatatatatcttgaattagtgtaatgatgtttcccatctcacattaactaggtcttcacgctgtttaaatgattccttcgattggcatccggtggacttgtacagaatcgtctccataagttccgagttccctttctcttcaataaacacaacctagcaatggctagaccaaaagagagccatggcctggccttcctaccccgcgaactcttctggatgattctaggctacttagaaccaaatgaactggtccgctgtcgccgcgtctcacgtgcctggaacgaagcctttagcaacccggccatcctactcgcactcctgaggaaacatttcccatggacaaaagaagtcaaaactttgagccaagagacatctcctgaagaacaagaacaaggtcgtcgtcttttcgaccaggttgcatcacgatacgactacctaaaacgaggaaaaccccgctctatccagaagtaccgcctctgcgatgactttggtggctctggagaccgtgaatggtatcaggtgcagccatgggagtcacacgccagtcatatgaggcgcttcattgaccgccagttctctgaggctttgtggactttcgaggatggcctgctagtctaccccagcgccgatcatcaattcctcgtgctcatggatttggaaacggaccggcagttcatggtaccgttcattattcgtggcaaaattgttcgtcgagtgcggctacagaagagcttgctcgtcgttgagtgggctgaaccaaaggcctttcactggctgaacgatagtgatggcgtgcatcgtcactttgcgtcttcctttgatgtgacgaggggtgaggaccagggctggaatattgtcccgcgcaatgaatggaagattatgtttttagggcatccgctgagcgagcgagatcggttcttctcctcgcatagcaacactcactatgtcatttatatatggcagccaaatcgcagcttgtataccgccgacgaagatgcacccattgagtctttgtttgtctgggacatatcgaaaccatcatcatatcgaccttcattggatcccactggacggctgagagacgactcacctgactctccatcaatcgtggcacgattcggattccgagacctggagttcttcgatatccggcaacgaggctgtccaagcattcaacgattggagattacggttgattcacaggcggtcgaaattacagaaaacgtttgcatctggccggaagacgaagcaccggagccatttggctttcctcggcctattactacaagcattcctctggtcggaaatgggcctcatcggcgccgggattttgacggaattctaccgccttaccgtgggaactgcagcatgctggcagagagtatgaggctagatgggtgcattatgacggacccttggtttggtgttattgctcacgtggctatactcgagcctgatcttggcttttgtcttcacttcgatccttggacgtgggtccaagatcagactatctatttgactatccagacacctcgctcgagcgtcacttgtgacaattgggatttcgtcggtagaggaaagctcgctggtagtgagaaatatctggtgggcgagaattgcaatcgagagctagtgatttaccggtttgatagatgaattgaaggacaagcggactgggccacttctgcggcctttctccttcacgacgcaatgaccctacaaatccgatgatataagaaacgttatatataagagcatacagacgtgattttggaagttctttttagatgtctttagatgcagtacagtgacttttctatatataaccagggattggttttcgtcaattcacctctgctttctcaaaggctatattgatctccttgcgtatctatcatatacctctctcactatttcgtcggtttaatggcaaccgtactgaaccgaattttacaccgtaccaatctatgggtactaggtagaggaagcgattatttatgacacagttgtcttcctctccttattatacaacagctggacgcaatacccaagaagtgcaaagaatttgagctagcctaggggatacacggcctcaatgctatggaatcatagatttgggtatgaacttgtccctgattctggggtttctggtatccatcacgggctatccagcgtcaccgaccaaaaccgcacctcgcacccgagttaatggccattggtggatatggagtgtttcaaacgagagaacgaaggaattaagtgactaaaaagtaatttatatacctttatttcggtcaaatcaagcacacaaagacggaagattcgttttgtgtgatggcgcgtagggtagaattagaagccgaagtgaatatacaggcaaatcagttacgtaccaaaaaaaagataggtgcatgagaaggaagtggtcgtttggtcaggattcaataaactcgattgattatcgggtgcgtagtcggccatgatattggctatgatctcttttttttttctttttgcagtttagacaaaaaatgaagattgaaaagtctcttcctcccaccacccccgggagaccgaacaaacaaaagagaaaaggaaatgtgacccaacatggatcaatcactgctcctgcgtaacagactccaatagaaagccgtagctcgtgaacttgcatctgacacaggccttgatgccacagccagggcaggtgagggtgaatgaaggcatccacaagttgcaatcactgcacatgggacggcagaagtccttgtaccataacccaaggtgggagcaaaagctgggatcgttcccaattgtaataggcgaggcgttcgggactgaaagacgaacttcttccaaccatccacaatagatctccagcataaggccattaagttcaccagcaagatcgttgggggtgtagcgtccatgggggtccgcgagcttttgctcgaggaatgagattagagggagcaacgaatcatggcccaccatgtaggagttgatcagtttgtcaacatcaaaattggaatcgtcagtggcagattcgggatcgtcggtgggagattcgaaatcctcaacggtggccttgaaattcgagtgcttgttgggtgagtcagtgaagctggtggagttgctaattgttgagaagccaaagggcgaatcggtgaagttgctggagttgctacttgttgagaggccaaagggcgaatcattgttagcaacagaagcacaatcagagtgaattggatactcgtcataggaacggagctttctggagtattcgtaggcaaacgtgtcaaatgtgtcggcaggattgcaggtcttgatgttcttctcaggcaggagatgcaccaaattatgctcgtagccaaattcgagatcgtctaaagctccttcgataacattatcaacggtatcggcaaatttggtatctccatcgtgatccttcgccatatctgctagatcacgtttcattcgagcccgcatgttttccctgcggagctctgcccgtgccttctgcacttcgggatcaatgccagcccattcgttctcccactggacattctctgcttcaaattgtgcccgtctcgccttggattcggctgactctgggtccatgtgcacacttgttccgtaactgtagtagtaggtatggctgtgctgacgtcgatcccttggcttgtgtttcgatgctggctcgctacattggcttggccagttggactcgtatccatggcgttctcgctttggcggacgattgtagttgcccttgtaagcccatgttggtgtttcatcctcgggggctagatgtctcttggccttcttttgcagggcctcatcaagtaagcgtcgacggtcttcgtcacggagaatctcgacagcatcttgaatctgtttttaatggcttgtcagcgatattcaacaacttcgtatggcattatcttggtgttgtagacatacttttctgaatctctcaatggtcgttgcagagtttccagccttgtctggatggagcttcaaggcaagacgcttgtaagcaatgttaatgtcagggagtttggcatgtcgctcaactcctaggatagcgtaggcatcaacgatcacagtggcagttgacatgtttgcggtcactagtggatgtcagtgttgtgttatatgtgtgagttggcttgagattaaatggtcgttgccagtctttggataggcagatggaataagagagacagagagagtaatgtgaaataaatatgaaggagtgtgagcaatcagaacatgctagtgaggaaagtgtgggaaactgttgggatgacaatgactatatcaaaactcacctaggcaccgcccaaacgtaaggagtcaaattagaaagaagggtcaccgtagcgactcgagaaaagagggagatgaatgatgtaacagagaagacgacgagactggagatgagaatgaggatagggaaagaacaagagtagcactggaggaagctgaacaagaggggaatagagaacaaagacgcaaaaaggatctttagagattcgagaacagaaggatcaagaaaggacgaagagagagggaaagaaggaaggatgagaattagggtataagtatgagggcgagggatgcgggaatcctatttaagtagataatcctattgtaaaccgaatcctattgatgagtgggagctatttatcgcttcatcctataatcgcattgaagaacaaagaaactgacctagtctccagggttagggctatacacaaacaatgcaatcgcacgtggctataaatcagatggttcctgttgaatggattaggttagggctagcaaaatctgtacatatgaaatggaaataaattgactctgattttacacaagctgaaggtcgatctaaatatgaacaagtctacactaaaggcgacttggtcctgtaaaagaaagcttctacatatcctcactggcagtggcaccggtgataatctcaaccagctcgccggtaatggtggcctggcgctgacggttgtacaagatctggaacctggaaagctattagagacgaatcttgaaaacattggaggtaaaacatacttgttgatcatctcaccagcgttcttggaggcgttctccatggcgttgcgacgagcggagatctcgcaggcgtggccttcagccatggcccagaagaggttgttggccagagcgtactcgcggaggctgctcagaacctgatcgtcaacctcgtaagaagagatgttggctacattggatgttagttgaaacttgatgaactgctcgggcgtaatgaagtctcaccggactgagtgatagcctcctcggagtaggcctcgagagtgatgggctcgtagctctgagcgttaacgaaagtgttgtagatgatacgaacgctggcgtagtcctcgggcaggagagcgatctggtcggcaatggcctgggcatcggcgaaggtggggatgtccttgcagacgttggagaagctcaagacgatgttctcgggggcggcacgggacagcgaagccttggccttctcaccgagaataacaacgtcggcgttggggatatcggccaaaatacggcgggtggccttgctcagaccggagtggataccaccgcaaagacccttgtcggagctggcaacaaccagaagaaccttcttgtcctccagaggcttggtctcggcctgctcgaacaaggtgttggaggtcttaccgtagacgcgggattcatccatagccttctgggcacgggtgagacgagtggacgcgacaatcttcatggtgttggtgatcttctcaatgttcttgatggacttgagacgaccctcaatctcacgcagagtcgcgaaggtggcggcattggcgggggcagggcttgatttcgcagtcagcaattgtcgttctcaactcctctgacatccagcgtattttccactgtcaatggtgtcgaggtcgttgcgtcggagtacgtcgggtggaaggactttagcacgaggtatcggatgagaacttaccgagcgacggcggcaccaccagcccgcagggccgggcggacggcacgggagaacattatgcgagagatttaaagaggaaaaggaacgagcagatggtgactgcgaagaggaggggagtgacgaaggttagacgggaatgcctcgctggtcgggaaggaagttgagaaccagggaggttctgtctccgtgctgccgctaaactagaaagggcaagcatctacggtgcgccattccgactttcaccgcagttgtgcctcaggcatttagtatttacataacatcacttgacgcctcaggcatctcacttgtagtccttagggcctcttttcccattgcattcctccattccaattccccccaacttgtttctctcttttctcgcctcttctcacctgtcttctctgttcctctggattcacccgcaacaatcctctttacgcatgtatcattgatgcagcagatcttataaccatattcttactcttcattggtcagaatttccttgctttcctccttctaccaggcgtctcgatttgcccgactcggcgcacgaggacgcctcccctcaccaaagcaccgatttctctcattttaccctcatttccggcttgctagtccaggggctatcatcatgagctcctcggaggacgacgcaccccttatgcgcgccaatggccgtggtaaaggtgcgttcctcgggttattcggctgcacatctacaatttgtcgcaaaccttcgctctccttgcactttgtcttctcacttctatatctctactttgtacacaatcgcacttttctcatagatcagttctcgatggtgcatctcacactttgacgtcattttcttcacactttgaacatacctcgaacagcattctaacatagcgtttcctgcacttctagtttcttcaaagtctcccgaaaccgtcagaatggcggattccgcccctgccacaaatggccatgttgatcctggaatatccattcgattcggtcctgtggaagacaaggatgtgaagatggaagatgaggaagatgtgctgggtgccggtaagcgcaagtctcggaccagtgtgggcgaaaagaagtcctatgcagaagcagaaagtagcgaagaagatgagcctttggtacgcctatccccatttcgggatgaccttagttattcccggtgcgaccatactgttgctttcggctgaagcgtctgacaattcgacagagcaaacgccgacgcacacatgtgaagcatgaagaccccgagaccgatgacgatgtacccttgggacgcaacggacgcaaacttcccaacgccgccgaaacatccatcggggatgagtctgattccgacgtccccattgaacggaagcttgctgcgcaaaagagaaagattgaacaaactgcggagaaggtggccaaaccttcgcgcaaacctgctgcaccaaagaaagaggctaagcctgcggcggccaagaaacagacaaacggagtcaagaaagagccggccgccagcaaagctgcccccaagaaggtgaaggctgaacctgcaaagaatggcaaagccaaggtgaagtcggaaagccaggacgcggaagaaagggaggcggaggaagaggaggagaatgagtaccgctggtgggaagaccatagcaagggtgatggaaccatcaagtggacaactcttgaacataatggcgtcgtgttccctcccgaatacgaactgctgcctcaaaatgtcaagatgaaatatgacggtgttccggtctctcttgcacccgaagccgaggaggttgctagcttcttcggaaccatgcttaactcgacccacaacgtggaaaaccctgtgtttcagaagaatttcttcggtgacttcaaggaggtcatcaagaaaagcggcggagcgaaggattccaagggcaacaagatcgacatcaaggagtttgcgaaatgtgatttcaagcctatcttcgaattttacgaggctcagcgtgatgaaaagagacatctgccaccagcggagaagaaggctgccaaggctttgaaagatgagcaagaagctccctaccaattctgtgtgtgggacggtcgcaagcagaaggtgggcaacttccgtgtggaaccaccttctctgttccggggccgtggtgagcatccaaagaccgggcgtgtcaagacgcgtgtgcaacctgagcaaatcaccatcaatatcggcaaagatgcgaaggtcccgccgccacctccaggccacaagtggaaggaggtgaagcacgatcaggagggcacctggcttgccatgtggcaggaaaatatcaatggcaactacaagtacgtcatgttagccgccaattccgatgtcaagggccaaagcgattttaagaaattcgagaaagcccgtgaactcaaaaagcacattgagaaaatccgcaaggattatcagaagaacctcaaacatgatatgatggtggaacgacagaaggccacggcagtctatcttatcgatcagtttgccctgcgtgctggaaatgagaaaggtgaagacgaagccgaaaccgtcggttgctgttctctgaagtatgagaatgttaccctgaagcccccaaacactgttatctttgatttcttgggtaaggatagtattcggttctacgatgaagtgcaggtcgatctgcaagtcttcaagaacctgaagatcttcaaaaaggcacccaagaagaacggtgatgaaatctttgaccgccttacggtatgccctccctttttcttgcagtcttgaatgttactgacgaaaaaagacttctgctctcaataaacatcttgccaactacatgcaaggtctaactgccaaggttttccgtacctacaacgcatcttacaccatgggttgtgttctcaacgagatgaatgctagcggtggtactatcgccgaaaaagtgaaagcatacaatgatgccaaccgtaaggttgccatcttgtgtaaccacaagcgcactgtcactgctggccatgcgaatgcaatggaaaaaatgggtgaacgagtgggttttcctcattccgccctcatggcgagagtcacaatactgatatatgttttaccacacagatcaagggccttcgataccagaagtggcggctgaagcagcaaatgcttgacttggatccaactttgaagaaaaagaagggcgcggcgttcttcgagatcgatgaggatctcgaccaagaatggatcgaagaacaccaagccttcttgatcgaggagcagagaactaaaatcaacaaaaagttcgagaaggagaatgaaaagcgcgttgctgatggtgagaaggaaatgaaggcttccgagctcgaggagcgtctgcaggctatcaaggagatggagaagaagttcaagagggagaacaaaaccggcaaggtcgaggccgaggccagaggcgcaacgattgaaaagctcgaaggtgccatcaccaagatcgaccagcgggtcgaaacaatgtccgtccaagctcaggacaaggaagacaataaggaggttgccctaggtacctcgaagattgtgagttcttctgttctgatttttacaatatcaccagctaattactcccattagaactacattgatcctcgcctcacggtcgtcttcagcaagaaatatgacgtgcccatcgaaaagttcttctctaaggcgctgcgtgagaagttcgaatgggccatcaagtctgttgaggaggaatgggaattttagtctaccgctcgtcgccttgattacttgcgatctccgtctttctcgcacattactttcttcgtactatattttcggttccacctagtttgccttggtcagacgatatgactttcgtttgtttgtcaagcgactctttcaactctaccaattgatctattcggatctttggttgcattggggtgcttggggaagaattgacgctgccattggctttttcatgattttcgttacagagaggcttggctcagagtacaagcctacgttattggtggtcgtgggtacgatatgatcggtatacgccagtatgcacgagggaaaaaaaaaacacaaaaaaaacacatcagaaaaggactcatcgattcggttggctgcatgacttggttaaatgcacacacactcatagcagttgggcaccttgcacagtttctgtcccgctgctctttgtcatttcggtcataggtcaaaaatttcgaatacttcaattcaatcgtttcttttccaatttagcataagctattgtttccctccactcgtagtccaacgtagtagttgcccggtgacatgtaactaggcttgtaacgtagttcttatgtctgagttgtggatatgtcctctgtggaacctgcacaacatatctgcagggtctatgcataatgcatgacatgaacgagactagcgctgtgtgtgattcaaaggtacaactttgcaggttgtatgtggttgatgtctaaaacatacacatcaaaagtatacaagggaacgttgatttgagatgcagatagaatatcagagaaatggaggaagggctcaatatgctgccaatgcagggccatgcaaaaggtaagaatgagggaagaaatcgaaatcgaaacatatatgcagaagacaagagaaaccccccccctcccccccatataatagcgattatcaattacagtacaaggtcgattcacatctagcgatgctagacaggtctgtctggataaatagcttcagaggtaggaggagagagagaggagagtagaggtggacaggagagcgtatggagatgcagatcatgaaagggtcgtgtcgtaggggattcaatgcaacctttttcggacacaatgcgatgagatgaccgatttcctcatcgggtagtggagaccgttaatgaatcatggtgggggatagaaagagtaaaataaccgacggacgggatatcttgaaaaagaaaaaaaaaacgacgaaagaaaagacaaaagatccgaaaactattcgaatcctctctcaacatggccaccagcccatgcgcttatagctgtccacaatttcgcggatgctgtcagccccgaagttcgggtacaatggcttccagccagtctctttctcgaacaatgacccgtcaacgcacatatcctggtccctgagaatatcacgctccaagaacgggctgatcggtcccggtcgcgtgatatttgccctctcgacgagctcagcccaagtctgcagaccgacttcattcatgtcatcgaggacatcgtcgaggttcagcttggcgatctgcgaggcaagcgacccgatgaacgagaccttgaggccgaacacctccgtcaaggccttggcgacgtgttcttgtttcgtgtcgttgtgatcgacaatgttgaaggcaacaaccccgtccttggggtcgatgaaacccttggaggcgcgccacttggcagcctcgaacagcgcgctagcggcgtccttgacgtgcagggtgttaattttcaagtcctttgtgtgcagaagttccagatcctgcttgagatcaacgtggacggcggacagacaaatgcctgtggcgaagtagcccgggtcgtaggcgccatacacgtggggcaggcgtaccgcgcagtactgcaggtttgggattttccgcagttcatccgcggccttgagcctccatgcggccagcttgtgccacggaacgagcttgtcggtctccttgcgtggcgttgagccgcccttgtagacatgcgcggtcgaggtctcgatgaaggcggggatgccgcgtcgggcaatttccttgccgagcgcgactgtcaggccgtagctgcgcacttcgtagacatcgtcgggttgggagtggcgtgtttcgccgccgcagttgaacacatagtcgaattgttcgccattggctcggtcgaatatgcgcgggaaatgttctgtgggagaaccggccttgaggtaagaatttgctacggggtgagggacttagcgccgggccactcacgttcacggctggcatctgcctggacaaacttgtccttggagcatgcctcttcgaattctggggccaaccaagccaattgtggcagaactttgtctaccaaacggacttccgaggctaggttattctcgtggatgtatagcgcgaggtgtcgaccgatgaagcctaaagacggggagtgtcagttgggagggaatcctctttttgaagacaaaaaaaaaaacataccgaggccaccgacaatcagcacggcgggtttttttgcttcagccatttggaatgtgaaagataaaaaagcctccccgcaggttcaggaggatgaaaggggggaaaggcgaaggacgggagaaaggaggggggcggactaaacgggcaaaggggaacaactaaaaagaaacagaaactcagaaaagaatccgaagaatattatttgatggaataagaggaaaaggaaaaaaaccccaaaatttcattattcgggattcgcattctcccctgccaagccggttaatccacgacgttgactacggagtatagcgagtgggttacagtggaaacaccagcatctacctgtgacgtcggaggggagatagtccgtcttagtgagattagtgcgaggggacaattccacttcttttaattatacagagactaatgtgcacagtaggttgtaccatgtgaatttgtatgtagtcctactacttactactccgtatacttcgtacatatataggtaaatccatacatccctgtgttcgttggtcccatggtactgggtttccgatcagccgaaccataaatgtgaatgctaagcctctcccatgcttaattcgactcaatatccaattgggttggtttcggctattgcaggattttcgactgagctttggcttaaaataaatacgtacaaatgttacatagagtcattggaagcaatttcggcatattcgggatattcgcctttggaaattgcagtcgtacatagtgttcttcgagatgaacaattcgaatagtttggtcgaaacttcaccagaatcggccttcggacacacaaccaagaagggaggggacaagaggacaagagcggggcactggcacttgtcaacgggcgcagggcgatcttgtgggcacggcacacaatcgaacagcaaggaaacggttagaagaggggtgagcggctaggtaaggggcttgctcacccgtgtccaactccatagagtctgctttagaggcctgaaaaacatatggaacaaaatgtaacttaaattagagggatgtggtgatatcggaaagatgttggcagattcttcaagaacgggtctggtctgtgccttctcgaatcatatcgcatgctaggaccctcatgctgatagccacatctcgtggtctgtagaacagagataaaattcgtgataacaacataaatttagctaatatagtggagccgcattgtaaagtttgatataagcctcgaaaattctagaaggaaacctcgctacggcattccgaatttatatggcctctttcatgattagcgacctccaaagcccgcttgtcgtgactacaaaatacgtcgactggaatcgaagctaagcatatagaaagcgagagtgtacagttgtgatgtatatatcttgacaggcataagagataacgtaatgtaatggtattaaatctcgttgtctagcgagaagtcggacactgttcttctatgtttttgaatatctttcgctcatgggttctaggaaagcgaccgatggaccatgggttgagttgaacaagccaattgccttcacaggttagtagtctactatgtttgctcataagcgtcgagggtgtgggaagcgtattctcggcttgttgctagtcgtgcagcttagcagtcctagctaacacgcattataatgttgttaataattaaggacgatggtcataaggttgatcactcggcatgtcgtaggtttggtatacacaaagggtgttgtacattggagtatctggatggtcgaagggagctaacacattctcattggtagatgagtatatccctcctacaatcaagtcgcaaccaagggattcggacattcttttaaatgcactaaaacatagatcatatcggcagcgtaaacctaaccactaccagggtccagcaatttctatgtaagatctctcagcctttgatttatacgaatgtggaattggctcatggttgatcactaagaaagagtaacattggaatataggtaggcctaactattgtctcccggcatgctacataggtatcaaacctcttgccttgaatcttggaacggtggagtcggaaagtggggccgatcttgtaccttacagacatgacctattcaatcacatagacgtaattataggttgaacaccttttccatacatatgtatgtaattattcacttttaatgatgagtaaggtaatattgcaggtatctatccgagcctatattctcgttataaaattatgccacattaaatttcctagcgggacgtcggaaggacgctcgagatgaataaacacgaacaaaagatagattcatcttggatacgaatcatgaacacgaaagagttccactcaaagccaatacatttcataatagccaaagtaagatatgttcatactgcaaaagcaagattgagatcacacaagcccataggatcatgatgcgcctagacacttcagcgagtttctgagctccttgatagcggtgtcaacatcgtcgaaagtcagagcagagaccgcccaacgagcatgtttctgcgccaactgcacagtgctatcgtctaggccatgtgatggttgggacgggaaatagggagccgaggcaaccgggacgctcgcagctgagggtggaacatatgtcggagcagcgggaggctggataggagcactagcacctgaagtattgtagaaagaagccgggtccggagtggatacagatggatcctcgggtggcggaggaaaggactggaatgcagtcggggtatctggaagcttaggtaccgaggacgaaccgccgatggtcgctggggttgatgggagctctaatccgcctgtgttgggatcggcatccgctggctgcggaggatacccaggtgcgttgcgaggaacagaagggatctcaggcggaggacgaggtgttgacgatgtccgtgatggatgaagcgactcatcgagagttgatttccgagccagctctcgtccaagacggtcagactcgtctgggatctcttcgatggaggcttgtcctggcttggaggcctgttccgctaccgactcgtcaaaagcctcaacatcaggatcgttgactagttcttcttcctgctttggcgcgggatttgtcacgttgggatcttcaccggctttgaaagcctttacaatccgaaccgcgtggaatttggcgaatttgatccgcccagcaagttctgggtctaaggggccccagattgaacaaagttcaaggaacgtagccgctgcctggaaagtatctgccgtctgcctttttggcgattagtcatttatagcccaaagtatcacacgtggagctcactttgtgactttgttagcgttcatagcggcctcagcacggctgaagacctccaacccaaattgctcgacataggcactcgccgcaacagtgtctgtcactgtatcattgtctgggttttctactttgaactatttcatgccaatatgatcagctgctagatctcaaccacgggatgcggaatagagactagtgtggggagcacgactcacttgttccagcttgtccacgaggcttgtcgtgtagagtttgatcgcatcatcggaattgtgaagacccctttcgataatctggttcacaatatgaaaattgcctatataatagggttcaatcagctcaaatgttcagttgcgctctgcgcggggtcttgcgactcacaccaataggcaatcacaggtttggcattctcgatctgagctgccctgattgcaaatcgcccaatatctgccgatcggagtccagctggtatattactcgtcatggttcaggatttttgtgatgttaaggagaagatgcatgtagtgaacaaatgacgtttggagctcgcggagtttccaccgcccgtgcgggggcctatgtaggggcccttatcggatcttatctactatgcggaccttatctaccacgatttgaagatctatgaaattgcgaaactatttcatgatatatttgtccgactgtactgggtatcattcatcttcattcgtccacttgccaatctccactctctcctcggccaatgcttccacttcaaaatgatcctccacctgccctcctggacccccgatgcgctcaataacaatccacacacagcgtgactcggcattgggtagcaaatcgaaatcatcgattcgtaccccggacgcagcatcgctgtgagttccatcctctgacgtggccagtatctccttatatggcccctgacccagctccacggtcatcaacacaggagatggagcaacagcgcgagagccgatcgtggaccgcttattcctcgcaataagtcggatgcgtgtcaaacgggagacctgtagcgaggccagcatccggtccttacccggagataaaacacccacttcggatagtacggcgcgccgcccagcagactcggaaaccaagggctggactacacacgggatcgtggatgagatccataacgtgaaacggccaagctggtcaggtgcaaaggtagagcagataatggtgtaggtgcctctgtccaagcatctagtctcggccagtgcgcatccgcgacggtactcgccactatctgcaatgatgtctcggcttcgcacgcgcgatatgcgctgcccgtttgaccaaaatatttttacgtgggtcgctagctccgcttcagtggtctcgaccaatatcgagatatctgtcggttcagaaattcgtatactgaattgtggattggagtggtatcgaggtgactcggcattcccgccagctgtcattgttgtccaggaaccacttgccttggtcaagcatagatatttatctagcgatcgtgccacggccacaggagcggttgaaaatgcagagagagtgaaattctgggtagatgatgggagtgattgctgtgagaccactgcggtgtaggttgacttgggaggcatttccagcctcataagcgtgttcggagagtccacgtatggtccacgatggagcgcaccgtcattgagagacactctgcggccatctgcttgaaatatgtagatgctgataaagcccgttccattctccgatcccccagaactaaattgttgctggtttgtcttaaaatgtttcccaagcagcagccagaccgttcctccatcactggagatggagaattggggattcttcacgaagcagccggtcataacttgaccgtgcgacaaatcccaagtaaaatgaatgtcctcgcggtatttgaacaaaccaggattccagttaaggtaaaggttctcgaaattttggagaacttgttcacaatccatccaaaacgtccctggggaaaggggaggtttatcatttaggctgagtgagccgagatcagccgtaaggctgctttgtatgtggggttctgcaccggcccacgggttcttcaaaagaaaccgacgacgaccctggacttcctttaagtccaagatagcataatcgtgctcgcccaccagccccaggccttgttgttctcgttcagtcagcttcccagtgccgatagtcaaaactacatcgccatgtgagaaggcactgtataaacgtccccaaatctcatcggaggtcaaatcgtcgtggtgtaaacagacttgttccgggatccaaccagtaagcacccaaaggtcggtccctgagttacttcctgggaagtcatagcctccacggaccttcaagtaggccttctccacaagagcaggccacaaaaaattcgagttattgcgatcgattacgtggagtgagcgtgtagtctttgacgatggcaatcgatcatctatcactaccttccggaaagatccgttgaagtagaaccgaaatatgtacttcccagaatgcgaaagtatcgggttcctatcctcactgcacgggtacaatgtcggtgatgcatgctgctcggattagcttttcaagattcctcgacgtgggatcaagtaagtccatacctgccctagacctcgttccgatcgagatgttgtggcacagaggctcgcgaccactgagcaatctgtcaagacatcctgcacgagatctgtttgttttgaagtcgacatagctggttcaattgcatcatgtacctgattggccgcgttatttgttcgtagcagatcgtgcggccgtttccagcccgcgaaaatttctctctggcattcagagaggtgcaaatcaggcgcatccctatacccggttagaatagatcagcattgggccatcttctcgacatacgtaaaaggctgccctttgaatacaaactcatcctgaagcggggcgcgactccatggtggaaagatgtagccattaagtttggcgccctcgaggataatgatttcttcacgggtggtgagcttccgcgtggatgccggcggccgtaggctggggaaggctttctggggccccgcacgagcagccgactgccagtcagcagcagccttgatcttctcagctttggacagcaattccttgcattttttatctagttgttttttatcctcggcgggcgccaagcgcaacgctttcatgtaatgctccgcggcattgatggctgcctccaatgccgctttctgggaggtcgctgtggctactgcctcttcagcgctctatcaagtcattagcttccttcaggtataattgagaaacataattcggtaccaatgcttgagatatgtaggactgtgtgggagcaggtctagacatacttgcgttgaccggtcgtggggtatccaggtaatcagatcgaacagcaagtaaattaccggattaggctgagccgagagggccctttacagattgtgaaatattccgcgacttactattgtagagatcgatacatttggtaataattggtatattgagaatactgtacacaatataatgaaaattatcccatcaagcacatatttagttagttaactctgtaaagtgaagtgaagtcatgacataagcccataccgacctcaccccgaagtggacctcggcttgttttttaggtgatagcgccgaggtgcatttgtgaattcccgcatgagctcggtctctctttttttttatggttcgggtgacttcggtatgatcatcgtctctatccatttccccattgtgctttctcctcaatctcaccttctccgttgttcggagccaagctgtgtcgagccccgctcaatatttctcgtgtcgcccggccgctaagagaagcgagccctctccctatatcatattcttaatcgtcgcgttcatttgatttcgaataccctaaaccgacattatgactggtcaatccaaacctgtgctgtcgccatggggcagcgccgtggcgggtgcgacaggcgccgtcctcgcgaacgcgatggtgtacccgcttgacttgtgaggtcccagataaaacagtcctcaaattatcagatcaaatctcgctgactctatcgctcttcatcctgtagagtcaagacaaaactacaagtacaagtcaaggagaagaatgcatccgtgcaagccgacgatgtcgaacattatgaatccaccatggatgccatcaccaaaatcgtggggaaagagggctatagtggtctgtactccggaatggttggagcccttctaggtgtcgcctcaacaaacttcgcatacttctattggtacagcgtcgtaagaacgctctacgtgacttctaccaagtcgtctcaggctcccggcacagcgattgagctttccctgggcgccgtctctggtgccgtggctcagatttttactatcccggtggctgttattacaacccggcagcagacacagccaaagggcgataagaaggggttgatcgagacgggtcgggaggtggtcgagagcgaggacggctggaccggcctgtggcgcggcctgaaggccagcttgattctggtcgttaacccggccatcacctatggtgcataccagcgcctgaaggaggttatcttcccggggaagaacaacctcaagccctgggaggcattccgtgagtagtggcaatcaccggggtcaacaacgacttgctaattatgaaattagtgcttggtgccatgtccaaggctttggccacgatcgcaacccagcctctgatcgtcgcaaaggttggactgcagtctcgcccaccgcctagccggaatggcaagcccttcaagacctttggcgaggtcatgaagcatattgtcgataatgagggtctcttttccctcttcaagggcattggacctcagattctgaagggtcttttggtccaaggtctgctgatgatgacgaaggagaggtatgtgtttctgttcataatttcgcatttgcttgtgctaactctcgcaaaggatggagctccttttcattgtcctgttcgcctacctcaagaacatcaagaaggataaattgcgtaaggcagtggacttggcagcggaaaaggccaagactagcatgcctgctaccctaaagtaattgttttatagtcagacggtgggatttttccgaactgtgtttacctaactggcgcgttggcgtgccattggaaattttggtgggttttgaacagtctagacatttcccggcattttcttgttggaaacacttgatatgatagatacttgtgtttccagcttttcaatatcactatagatctgtacatggtcatgtcatgccttacttgcttaagctcccatgtagtacttgtttttggacgcactatttagctagttataatatccctgattacacatgtagaaaggtcctctatacgtcaatacatttcaccaccttcgtatattatacccaagtaaagtctacaacttccatgtcaatggcgagtatggtagtaatggccgctgagtacctacataagaatgaaagacatttgagaagccacgtaggcatcattttgggcatcattctacaacgatccctccaatagttagttgtagttatttcaaggtcattggttgtttactaataagaggaattggtggttgctgctttaccgcttgactgatcaacttttaccccaacaactgtcaacacccctcaccaaaccctcgttctcacaccacgtaaacttgccacttgtgtggcatgggtcgtgatgcgatggccgccatggagctccgagtcgaccaatgacgaccaaaaacaaacacccggctcctggctctcctccgcggcgaacaacccgagttccatcttcgactggacagcattcacagaagtcagaaccattgtcccaaccctcgtcctgacaagcggcattcttattgcagtgcgcttccaccgccgctacctacggcgcatccccgacgcgcccagcatctcgtcctcgtatcttcgacggcggagcatcttcggccaagtcacaagcgtcggcgatggagacaatttcaggatatttcatacaccgggaggccgcatggctggatggggctggttaccgtggaaaaaagttcccactgtgaagaaggatctgaaggataaaaccgttcgtcacccaccactcacctattcgcttgctgctcagaacaggcataactatgcctctacatatcataccacaggcccattctttatatctacaaatagcttacatattcactcaaccccagatccacatccgcctcgctggcgtcgacgccccagaactaggccacttcggccaccccgaacaacctttcgcgcgagacgcacacgcctggctaacatcctacctgtcaggccggcgagttcgtgccctcgtctaccgccaggatcaatactcgcgcgtggtagcgagtgttttcgtccggcgcgcatttgactttccgccattccgtcggcgggatgtttcttacgaaatgctgaagcgtggcttggctactgtatatgaagcgaaggttggctctgaatttggcggtgaaaagatggagaagaaatatcgcaaggccgagtggcaggctaagaagcgagccagggggctttggaaggattatggtcgtgtcgggtctgcttgggagagtccgagagagtataagaagcggattggtatggaagatcctcctccgatggagaaagggaatggcaaggggaatgggaaggggaaaaccgggcagaaatagatgaacgggtcgcggtaagctgggcttgcgattgtggctatgagcgtttatatgttgttttttatgttctggcatttgcatttgcatgtgacgagatggcacgactaccatttcactatacagcgttgtaaatgtatggatagtatgcgacaatcatgatcaaatcgcactttgaatgctgaatatgacaccaagtttcgttaatctatacatgcgcggggggttttgttccaaaccaggccccaatttctaaatggacatcaagactcgagtaatccgcctatagattaggagaatacaacgacaaaagtcagtatgcaggctattatttgctcagcagaaccgccgctcaacctcagcgaacaattttgggctaatttcgttggagctattaccctccgcatggaatagacacccttgacggtcatagtgctccaagagggatttgctcgtctcctcaaacttctgtaaacgctgcttccatgtatcgagagaatcgtcctctcgctgcgtcagcggctcgcccgtgacatcgtctctgcctggcacctttggtggatggaagtctgtattatacacgcgccctgagggctcgtggacccagcgtgatgcgatgcgggcgagaatcactgatggaggggtgattatgtgcacgacaaagttgaccgatactaggctgtccaaggctattgcctgagttgcggtacggggaaacccgtcgagaataaatgaggcagagggatcgattgtgtgggctgatgaggaagtatcggctgaagaagatgacgaggatgttgcggatggtgaggatgggagtggtgggaggagccagcccttagatttcatatcatcggagatcaatttcaggatcattgagtcgggaacaaggttgccggactgcattgtggcctcggcttccaggcctattactatgttagagatctctgctctgtacgaaactgcgccgttgctcattctacttaccgaggggtgtgcgtaggcgcacattttctctcaacagatcacctgagctgatggaagccagctgtggaaatcgggatagcagtcgctcagactgtgtcccttttcctactccaggcgcgccaatcaagatgatccgcgcggccttacggagctgctttgtcacatgcgacataatatgggattgctgatgctgatgctgagggctgaggttcaaggttgctggaacggagaattcgacggtttcaaatgctggggatgcgggaggaacgacggggagaaaatatgcacaatatcaggacagcataatggattgaagggaagagtgaaggcctgggattagaaaacaaccggtcgcatatctccaaggctaactcttttgagaatgttgcttctgcggggacgcccggggaggttgatcttttcggctatcggtgaagactccgaggtaagctgtatggcagcactcaagtctatgtaggtaattatgaaaatattatacgagaacataacataactaccccgagcgaagatcaaagacttatatatctacttacaggactcggtatcaatgctcatgtcacatgtcgtgccacatggtcgtagaaaacgctctgatcggggaaagccaccacccgtgctcaggccaagcaccccagggagccccagggagcccccggggccccagggctggggtacagtattacgtaatatgcgccaaccgatttctttcacgtgattctacgcgtgggacgcgttcgcgttgaccaatttagtgcggagatctcatacattcgtttctcgacaacacaatacctacaccatgattcgacaagacgcccatcgcattgatcccaaacgacgggctgttattgaccctaaaaaaagacaatttgctaccccagcgtacaagcagcaggactatgctcaccgtctgaacatttatgaaatacctcctaccgcggagatcaccctcgaacaattcgagcaatgggccattgacagactgaaaagtatgcaaatttacaccttcctgttgtatttctacccactaataccaaacagtcttggccgaaatcgaagcatgctcttatagaaacaaatcccccgccgagacagcgacctacattacacccctgctacagaaattcctccctctctcctccaatacatcctctccctctggcgctgcagacccccgcttgaaaaatgagcgccaaaaggaccattactcccatttcatcctccggttggcgttctcggccacagaggacctccgtcggcgtttcgcccgcgccgagaccatgctgtttagatttcgtttccagcaggacgactcgagggagaagcgcgcattcatcgatagcttgaatctcgattgggaacctgtgggtgactttgaaaagacggagattgcggaaagtctcctcagctccacgcccgggctgcgtcggcttgatgatgagacctggtataaagtcgattgggagaaggttcccgaactggtcgaacggcgcgcggttttcctgaaaaaaggcaaagcttatgttcctggtcgagagcagctgagcatgatcatggctgagtttaccgctcgcttggagcgcgcactcgaggtatgtctgcagtggtgacgcttaatacatgaaatctcgtggctgattaattctagctcacgagtcgtgccctccctcgtttggacgaggatgatcgtctaacgcctattctcaatcatctttcaaagaacttcggcagcgccgagtcggtatactcggaaggcgaagggtatgtggacggatctccgatcacggccagctccatcgaccaactggcccaacagcatttcccgttgtgtatgaagagcttgcacgtgaacttgcgcaagaacaaccacctgaagcacttcggtcgactacagtatacgctcttcctgaagggtattggcttgtccttggaggagtgtattttgttctggcgtcagtcgttcaagggcaagaccgatgacgagttcaactcccaatacaagtacaatatccgtcacgcctatggcgaggtcggtggggatgtgaatcgtcgcggaaagggctatactccctactcgtgccagaagatcctcggcgattcgaatcccggcattggccagactcacggctgtccctatcgccattactcggttgataacttggtgggcttcctccaggccactggcgtcaatgacaaggaagtcctgcggggtgtgcgtgaggacgttggtaagatgcggtatcacattgcttgcaacagagtgttcgaggcgacacacaagaatgagatcaagaaagtcaaggaggatggctcgtggagtcagactgaccttgacacaattgttcatcctaacacctacttcaagcgcagcttcctgttgaagcagatgaccaaggccccgaaggatgcttagggcgtcttttcacatgtcaaattttcatgatataatgtcgggcagtttcccagttttctgttttatagtcggcgtttagagggagcataagcttgtacgagcacatttgaagcaggtggaattgaagcaagataatatatattctaaccattatggtatacaaaatgggagtgtgaccacagctgattcccagagaatcggaaaggatcagaatgacctctcaaatccaggtgcccagcaacgggtcaagtcgttctccgctcaacgagtggacaactttgccatggaatgacggaagttgtcgatattaacatgtttacacacattgtaggctggcgtgaatttgaagaagaaaaagaaaagagcagcagaaactgcgcacgagccgagttttaaggatgttttgatccgggaggcggcagagaccaactgtgctgcaacctggccttactcacggattggacctccacacaacatactcctccatctcgttcattcaatccctaggtattaaacgggactctgatttcttttgggactggattatgctccgggtggctcacttgctttaatttcttggagtagaccctaaatttcaaggttccctctcctcgcgacttctcggtatccgcatataccccctccctttgtcaacacaggaccgagtcccggaacatctacctacaagatggattacgaagcgctcaaggatcaatggagcgatgtggaggaccgcgatggcctcaggctcagttggaacactttcccgagcactcgtatggttcgtgatagtggccctctctgaccttcaccgcatcatccgctgatgcttgatataggaagcgtcccgcttggtcgttcccatcgccgccgtgtacacaccgttgaaggaaaagcccgacgctcccttgctacaatatgagcccgttacttgcaagcagccctgccgagctgtgctcaacccatatgcgtacgtgacatgtcgatctgatatacctcaatgagtagatggactgacgcttggacagcactgtcgatgtccgcgcacgagtctggatctgccccttctgtctctcgcgcaaccctctccctccgcattacaaggatattacagagaacacgatacccccagagctccacccccagagcacgacaatcgagtaccaattggcacggccagcccccgctccccccattttcgtctttgtcgtcgatacctgccaggaggatgatagtctgcaggctgtgaaggattccctcatcatgagcttgtctcttctgccgcccaatgcgctggttggtctgattacgttcggtacaatggtaggcaatgatgatcttcgcaacgcaggtgacatgttgttgaccttgatatataggcccaagttcacgagctcggctacatcgaatgcgccaagtcatacgtgttcagaggcaacaaggaatacaacgccaagcaggttcaggagatgctgggcctatccggtggcgtgcgccccggtgttccccaacaacagccagctcgtcctcctcttggcccggctgcgcgcttcctcatgcccgttcaacaggctgagttccagatcaccaatgtcctcgaacaattgcagcgcgatccctggccagtggccaatgacaagcgtcccctgcgctgcaccggtgttgccctgagcgttgccgtcggtctgcttgagagttccttccagaacgccggaggccgcatcatgacctttaccagtggtgcagcaactgagggccctggccacgttgtttcgcctgaactgaaggagcctattcgttcgcaccacgatattgaacgggacaatatcaaatactacaagaaggctgttaaggtcggttctcaacgcgtgagtgtattggattttgctaatttgctcctagttctatgatgccctcgctaagcgcgctgccaacaatggccatattgtcgatattttcgccggctgtcttgatcaagtcggtttgctggaaatgaagaacctctccaactttactggcggttacatgcttctcaccgatagcttcacatcctcacagttcaagcaatcgttcgtgcgcgtgttcgacaaggacgccgccgataacctcttgatgggcttcaatgcatccctcgaggtgctcacgaccaaggaacttaaggttactggtctgattgggcatgccatctcgctgaacaagaagtcaagctctgttggcgagacagaatgcggtatcggtaacacctgtgcatggaagatgtgtggaatggacccatcctctagctacggtatttactttgagattgccaaccagggcggcccagctgctgttcagcctggtcctcaacggggtatgattcagtttttgacatactaccagcattcctctgggcattatcacctgcgagtgaccaccactgcccgccccttgagcggacctgcaggtgacccaaccctggcacaatccttcgaccaagaggctgccgctgtcctcatggcccgtattgcagtgttcaaggcggaggttgatgacggtccagacgtcctgcgctgggttgatcgtatgctgatcagactctgctcccgattcgctgactaccggaaagatgacccgacatcattccgattggaaaagaacttcaccttgtaccctcagttcatgttccatctccgccgaagtcagttcttgcaggttttcaacaactcgcccgatgagactgctttctaccgccacgttttgaaccacgaggatactggtgactctcttgtcatgatccagcccactcttgattcgtactctctggagcaagagggtgctcagccagtgctgctggactccgcttctatccagcccgcccacattctcctccttgataccttcttccacatcctgatcttcaacggcgagacgattgccgaatggaggaaagccggataccatgaacaagagggatacgagaatctcaagttgcttcttgagcagcctaaagaggatgctagggttcgttcccacctttcttgttgatctttaacctatttactgactgtgtattataggatcttatttccgaccgtttccccctgccgcgtttcatcgtctgcgatgccggtggttcccaggcgcgtttcttgctgtccaagttgaacccgtcgaccacccataccacaggtggctacggtggcggtgtctcatcgcagaccatcttcactgatgacgtatcgctccagacattcatggaccacctgatgaagtgagttttcctgcaattctgatggatccttccatgctaattttattctagacttgctgtatctggaaccagctaggtgttatgagacatggccatgagagcaagggcggtctgtcatcgaccctcgggtcttgtgtatctttagcggtgatttaaatcttttgacgcgatatagtagaagattgaatggactataccattacaggaggatttcttctaatttcctgcaatatttatagctaaaagccctgaaccgccgagaataaaataaatagccgtcttaccatcccaccctgagttagggtgggtctgtcccacataacgagagattctcacaaaacgagagatctctcttttaggtatcttttatatggtatacccgtacaaaaggtacatatatcccatattatgttcttaagcctttggagttaaaggggaaataagagtataaatcaataaaaattttatagttgaattaattggctgataaaagaaatttcagatatcttatatagagaagtaaagaccatatttatgaaagagatatatgtaaaaacatcaacgttctaccgcttagagaatactcaatatttcttcctaatatgttaatagtaaataaaatagacctcctttagactatatatctatcccctactatatctttttgtaagtattcccagaagtgacaaaatctctactatatatatttgtaccttttgtatgggtataccatataaaagatacctaaaaagagaaatatctcgttatgtgggacagacaggtatggggcggtaagatggctacatacccaaagaggcaagaagcttgataagggttttattgtgtcacgtgcttaagcttgcgtgccctaactccaaatttgaatattcgcttagatgagcaagtgtgggccgcgctagcaacgagtctccttcaagtttgatttttttgctccttttcttcctctcctctgtaaccaccctcttcgacaaccaaggaagatcgactacctttcgcactcgccatgcgtaagtatcatctacttggcctattgcaagatggcgactaacattccctcgtgatcagctccaaagttcgatcccaatgaggtgaagatcatgtaagtgaatttttccccacaggtcctctggctgtattcagccaacaggaaactaatcattcttttgtctttagccacctgcgtgtgactggtggtgaggtcggtgcccagtccgctctggcccccaagatcggtcccctcggtctgtctcccaagaagattggtgaagacatcgccaagaacactggcgactggaagggtctccgtgtcaccgtccgcttgaccatccagaaccgtcaggccgccgtctcggttgttccctccgcttcttccctcgtcatcaaggccctcaaggagcctccccgtgaccgcaagaaggagaagaacatcaagcactccaagtccatccccatggatgagatcatcgagattgcccgcatcatgcgcactcgctcgatggccaaggagctccgcggtggtgtccttgagatcctcggtactgctttctccgtcggctgccaggtcgatggccgcagccccaaggatgtctccgacgacgtcaagtccggcgagattgacagtgagttttgcccatttatgagcggttcgatcagctactaacagtctaattagttcccgaggaataaattattctctcttgaatgctcaaaaaagaggaggcctatctgatttctatggcgtgcttctcttaatgatgagatggctagttgcagaatacgaatggttactcaaaaccaacaaaatattcatgagtcatgacctatgataccttttcctaattcgcgagtgcccaattggaacaaattgaccagctcgctgctcgttctttttcctcgttcctttccggttgtattatcctcctttctcccaatccctctcgtgatcctcccgccttctcctatggcgatgagaataatggaaggctatgcccggcgcagccgacagtccatcctttggatggaacccccacaacactctggcccttactgttctttccctacggggattgatcatatcaaaacgtggtataggcttattttaagtggggaagagaaaaccagtcccattactcatcgcggtatccttggagcttgtcttcgtgggtacagtggtccatatttcgggtctacatctcttgcagatgattatccttatttctcgtaggccgtagtctcgctagctccaatgaacgtttctgattatcattttattttgcatctcgtatcaattatttattctgcgcaaggatccgtggggtcggaccaaagtacggagtactttaccatatctaacacagaacctgcaggctgtcagcatgcgtacatatgcaacgtgatgttattgacagttgggcgtaattctaatattgatatgatatggctacttggctgcttacaacataggctgtacggaatgctaggttagaaccctagtatttatttccattgctcctgaccgatatatatattccgaatgaaacgagccccacgcgacaagggcgatgtctgtgctgcaccacgaatttacaattgacatacctagctactccgtacatggtacagaagtagacgtcacaccaaggctgcaaatagccctgcctgcagtctggaacatccaacggccgctacaccacgcagagctcgagccaacaagtatccgagcgtgacgcaccaatggaaattcacatcagaacttagtacggagttctccgtgcagcgattttgttgcccggcatacgtggacaagaacagttgtcctaaattctcctccgtagtggataaatagaaaaagagaatattgtcaataattgctcacgaatggctgtgagattggtcaatataataaaatgaggaatgtcaccgaattaatgtctaacaatccacccataacctcagccctgataaggcgaggtgcatgctcatccacaacgggggctgatccattttgatgtgcgagttgtgtttcgtttattcgcgggatatatttgggtcgaatggagtcggaatatcaagtagaatatcaagtggatattgagattctttcttttattttatttttctctattgacatactgaaagattgagccagtcaacagtgtctgtatcacccgacccgcatgccgctgtacaggaacgttgtgcaggccaaggaaggatgcgacacacggtgggggcagtttgccgatctctgcctatgacacgttaactttatgggaaacggatgaagggttgggatattttctatatctttttttataggtatgtaggtataggagagaaaggtatattatgtgatatacaaaaaacatatgatttaattgcttcgcttcgctccgcaattaaaacaggaggctaagaaatgacggcagggatcgaggtggaaatgcttgcaagttggaaccccagaataataccggataggcaaggatcggaggagccaacaaacggggcctgtcagaagaggatgggaaaaaagggaagaattagggaaaaattagggcaaaagagagaagaagaaagaaaaagaaaaggatgtcaacaaatacggcatactcagtccagtccgagaaggagaacgagagacagtttggattcaatttccttaggttcagctaaagtcccagagcccacagaaaccgagaacgggctcgactcgatcaccggcgggggcgtcaccgatccatcactagtcgccgtgatggaaccaaatgatccacaaggattggatttatggagagccgttggatcaagtggatatttgacatttgatatttggatttgtatgttttggagggattgaagggagggagatggggtatattgtatagcagaggggatatatccagagatagaagagatagaagagatataagagcagcatagagcaatatcagacatagaacataccccattcaacatcctacacattgtgtttctttattttatataaaatttatcttccccccacccgaatccaccgtgtccactcccctcgctctcaccttcaaccttgttctttctgactttgcttgactttcttgatcttctcgttacttttctcctcttcttctcttctctctctcccttccctgcacagagtactccatatcctcttccttcctgctatccccactgattctcttggtctccattattgatctacccctcgcacttgccaagatctcctcttattggctgtatcggacaccagcatcgtgagctggacattctgtctcccttgcatctctgatctcctcttggattttggatttctgatttttttttctgctccctcttatcatacatacttccccatccacacttttcagtcgatgacgataccctgaatccttggtttgcgcaaactgaaaagccgcaaccggctgaattgcttagaactggcttgactggcttcacagaatggggtgtcggaaacgttacaaggatgattgttgaatgttgactccattgacgtgttgagtctttggtatccttgtcgctggtcggccaggtattctgatcccagtggatcgaggagagagcaaagatgtatccgaccgtcgcaccgtttcccccggttcaaccgcaccaccgattacattatcatacaagcaccctcaaccaccacatgtacgatgcgaacgactcccaactccccgtacgcaatgacttctccaaacctctcttcaacacaatgccacgatcgcgcatacaactacctcatccagttcaacgcgtggattcccgcgatggctccggctatagctccagcaccaacgtggccgaacataccctgaggagaaaaacccccaacggaactctggctgtgggatatgatgggacccctaacgataccattcagccaccagcatgcaagcatatcttggtttcgccgatggagcagagccagttcattccgcctcaacaagggatgcagtccgaaaattggcagctcatgctggaccagtcagccaccaagcaaatgaatttccccccggtcttcaaaaatgactccgcaggtaatacaatccaaggagaagtcgttcaagatgtgcatgggacgagctgggttcgtcctgtccattatcctccgggcgttgactccatgttgaaccagactttgcctctgcagccatctcagcgatacctcttgcagaatgggcaatatgtgcccaccgttctcccagcaaccctgcaatcgtgcctaggaccaactgcttcggcaggtactggaccattcggtccgtattggcctgatggagtatacatcccatatcgcccggcagcttttcgtgatgcgcgttttgaatccccgacgccctttacaaagcagatgagccagtctttttacgagctcaaccagccagccttcaaccaagctcaagctccgctgggcagccacacggattcggggcttgcatggggacattctgtgtctgatttgcctacgcaggactctttaatgaaacctctttttccaccacgtcactctgaccaattacctttccatgcccgagccaaccgtcccctatcgggcctttcgcagccactgaacaatgagcccacaaattggtcaagtcgcccactacatggattccaacccccagtccctgccgtagtagcgaacgcggatttcaaggagaaagtcctatcggaggctcacggtgtctatgttgacctcctcgcaaccatccaccacgcccgccgcaacagcaatagtaaggctgccgtggacggttacccccgattcttgaagccgagcatctaccctaaacccccacgacaaccaggtctcgacttttcacaagcccctccgcccgacctcacacgtcataacagttacccagctagtcaatatgacttgcaacgccagaaatttaatgtcgcaggcagccataggtcgaacgatcctacatctacttctcgcgtccagactcgccgcccatccttgaataatttcgctcacagcagagggtcggatacccatatgctcggattgcgtgacacgggctgtccttcaggagtgccgactttcaccaggactcgtggctctctttttaatgagggctcgcctatgtccaatgctgcatctgcattgtcaatgctgtctgacttgtgtgcggaaagtcgttgggaatggatcgacggaatgcttctcgggggttgtttagcctatggcttgggtgattatcacaaagccgtgcggtggtattccaggatcatcgctcgtgactcgacacacgtggaagccatctccaaccttgctgccaccatgttggcactcgatcgccgagaggaggcttcgcaacattggttgcgcgccgtgcaactacggccgagcttctttgaagccgttgaacatctgataggtctactctgtaatagccacagaggcagagaagctgtcaacatcattgattttgtgcagacttcccttcgtcatcccaaagacggcgattgcttcaagacagatgaacatgctagcgaacccgagagtgacgctgagagcaacgtgtctgatgtgtgcatgtatgacaaagcatctttcgagtatgatgatgagatgggacgaatgcagggaatggaacctggctcaccggatgctaaaccccttggttttgcgagcagtggttatgcaatctcaggtgcggagaacgggcgaatgctagctttggtccatgccaaaggtaatatgctttatgctcttggtgataacgcgggagctgcagctgcatttgaggatgccgttctcatcgccgctggccgaagacgacatggtatccaaagcatcattaaacaaatttttgccgccttttctagccctccgagtaatgggtattctcaatccgagaaggagtcccaggagagcattctgctctatcctgatacagcattgaaaacagccaaacttgttttcccagcaggcggcatgccgccggggctccaataccgnnnnnnnnnnnnnnnnnnnnnnnnnnnnnnnnnnnnnnnnnnnnnnnnnnnnnnnnnnnnnnnnnnnnnnnnnnnnnnnnnnnnnnnnnnnnnnnnnnnnnnnnnnnnnnnnnnnnnnnnnnnnnnnnnnnnnnnnnnnnnnnnnnnnnnnnnnnnnnnnnnnnnnnnnnnnnnnnnnnnnnnnnnnnnnnnnnnnnnnnnnnnnnnnnnnnnnnnnnnnnnnnnnnnnnnncccccggggggcgcccccccgccggggctccaatacgtcgccgaaggtattgctcgcaatgcagcaacttccaccacgagcaattctctcctttcattggcgaaaatttaccaggatggcatgtccaacgttggatcctcaggacgaaccaggtcttcccctggtgtccgggatattttggccctctattatctttccctctccctacaacctagcccgtccactgcaaataatgttggaattttgctggcgggcattcaaaataacccaccggcgagaggtttggtgcgttcgaaaggtgagactcagcatcacctcgagatccctggagtcatccctgggagtggaatatccctagccttggcatactacaactatggcttgcatcttgactcgcgacatgcccatttgtataccaacctcggcagcctactcaaagacatcgggcagcttcacgccgccatcaagatgtacgagcaagcggttcagtgcgatggcaacttcgatatcgccttggctaaccttgccaatgctgtcaaggatagcggtaaagttaacgacgccattgtatactacaagcgagctgtcaaggtcaaccccgagtttgccgaggcggtgtgcggattagcaaatgccttgaactctgtctgtaattgggtaggccgtgggggcatcgtcaacgctcgtggcttccgagatcgatggcatgttgatgacaaaggaatgcttcgggattcgctcaacatcgatacgggctctggatggatcaagcgggtagtggatattgtcgaccgacagctcaaggaaggcgaatattggggccgtggcatgttgactgcgagtacggcagagcaattgtgcctgcaactggctcccgctttggaatctactcgctttgcttccagccatcgtatctctctggtaaagcttttccagtcctgggccggacagaaatgggagggatctcgactcgtacgactcgtcgagcgagctatccggtctctcacttggcagtggtatcaggatcgctatgttttcggcaaagattacccgctttccaagtatcgtcgacctcaactcccaggaggtctttctgccccgaatgcacctaccgttctgcctttccataccttcacttgtcccctctcggcgaagcaaatccgtcagatctcccagcgcaatggactgcggatttcaacatcgactcttagactcccctggctgccatccaccgtcttccctccaccgtctccgcctagtccgtaccttcgagttggttatgtgtcatccgacttcaacaaccatcctctcgcacatctgatgcagtctgtgtttgggctgcatgattcctcccgtgtcaaggcgtactgttacgccacgacccccagtgacaaatcggtacatcgccagcagattgagaaagaggcccccgttttttacgacgcgagtggatggccagtcgatcgactagtccagcagattgttgcggatggaattcacatcttggttaacctgaacggctacacgcgaggagctcgcaatgaggtctttgctgcacgcccggcgcctattcacatgtcattcatgggcttcgcaggcaccctcggtgctgagtggtgcgactacatccttgcggatcagctttctattccgccagagacattgagccccggacggcgcaccacacggatcgaggatcgtctcctggaagaagacaatggcgaggaacttgaagactgggtttacggcgagaagattgtttatacccgtgatacctttttctgctgtgatcaccgacagagtgccccagatgctggcgaaaagcacgtatcctgggaagaagaacaagcccggcgttggagaatgcgcaaagaattattccccaagttgagtgatgacactatcatcttgggtaatttcaaccagttgtacaaggtcagtctatttgcgaggctcatcccaaaccacataactaacccccttgcaggttgaacccacgacgttccgaacatggctgcgcatattagcgcgaatccccaacgctgttctctggctcctccgcttcccagacacgggcgaacaaaacctgcgagacatcgctaaagcctgggccggcgaagagacggcatcgcggatcatcttcacggacgtagcgccaaagaacacacatatcgcgcgagcgaaaatcttagacttgtttctcgacacgccggaatgcaacgcccacaccaccgctaccgacgttctctggagcggcaccccgctacttactctcccgcgctacaagtacaaaatgtgctcccgcatggcgagcagtattctcagtagcgcgctccccaactctgaggctggtcagcgcgcccgtgaagatctcatcgcctcgtcggatgaagattacgaaaataaggccatccgcctatgtctggatctgcagtactctggtcatgagggctatgcccgcggccggctggcagatatacgacagatactgttccgggaccgctacaagaataagctcttcgatacggcgcgctgggtacgcgatctggagaatgcttatgaggccgtctgggcgcagtgggtgaacggtgaagaaggtgatgtctggttatgatgtgcactgcgaatataccccttgagcgatttttcctttttccttttcttctgttcattcgcattctattttgcatctacctcgctcctaccttccgccctgggtttgagctggatcatttatgtaatgaatttactttttgcatgtggctttttatgatgtatacgtacattgggaacatttacgaaagagggtctgtcggatggtttcttgggcaggcgtttatgccattgatatttattctctgggttcctggttatgacgacctgtagtctttgtgatttcggtcttttggataaactgaacagcataataggtctaccacaaccttgatccagtgcaatcggcctaccatttcctctgttaatgatttacaaacgcatctcagcaacgaatcacattgtacgggcacattatatggtaagctcgacccctatacttagcagcataatcacatcatatccactcatctaggaataagctgatacccgctgtctccctattgcggtatgcaggatcaagccacgaagccttcagccctgaaaatccctgtttacgattggtacgtcgcccccggcgaccaatagagtcgacgcccgttccagccctgagtcacaatccaagacattcattcatgcgccgagacagcaggccaatcaataccttgatgttggcattggctttggacggagcacaacaaatgttctccccgcatgagcctatcacagcatcacacctccctatctcgtctctctacgatccaagctccatgtcttgagaacgccctccctcccgtctcgcgaggggatggcgtaccaattcggatatcagcatcctatttaacccacgcccagtccaggtctgggtccagatcgacgcccatcagccccaaaccaaaaaccagaactcaaaagccaatctactagcgtgacggaggctgaatcaggacatccgcatttgcatacaggcaaaaacacgccacgtcttcggctctgttgcacattacgcattgcacagtacatacacccctgaaactagtggagtaagtagaaagggcgttaagccatggtctatatcgacatctatctattcctacagagtacacatcatgcacataccccggtcgacgcggcatggcattctggcattatattacatgtccacgccctcggactagggagtaaagtaagacatgcgcttatccgtcttttgtctgcaggttgccaggttgattcccacatggcggtgtccacgcgcgtcgaggattttgagattgaccggtagggattttggtgtgtatatatatagagtgagtgagtgggtttggtttgtatatacaacatacaggtacaggttgtcagagatagaggaatgacacaccgacaagtacttagaatagacaaaatggatacgatgtatatgacaggaagatcaacgacgaacctaaatccgcccgtttgaataaagaaatgccacgttgaaattttaataaaacaatcggcagatatcctaccactactccgtacccacccaggatccccctcgccctcatatccctacatcaaaatacaaacaataaccccctacccttcccatatcccttatcccttacatcacatcgccctctcgttgtcgattcccgtcccagccaagtaagcccgttcgcttcacaacgcccacgagagagacaaaaccatgcaaaccgggaactcacctgtcccatgtgccgtgtcatatctaccagccctagcaggatcacccggttgtccgtaattgtcggctatggagcgttgtgagtggcgtggcgcgggtggggaacaagccacacagatttgtggcgttggatcggtcgattagccgcacagaatcggcacctggagccgaagaaggtggcttgttttgtttttgggcttgtttggatataagatgttattgtcaagatgttattttgtatgcggtacgggagttcaaacaaatggcggagttagaagtatggattctagaactttgacggaggaggaatgatgtgttttaaggcctagagggtccataagtagtccgacgggcctaattgggaatgtgtttcgcaagcaggtgttacttgaattagattagaacaaatgctatactcgaatgtcgcgtagttgctgctcctatacataaccctattaagccgatcacatgtctaagcaatgctagttaactaactagttactctgacaagattgcatcattagcaatgacgatcagcgagagcgagaccgagacccagacccagacccaattccaagatctcttaatcccgagactaacgataaatctggaagccaaggtcaagccccccaacaacggggtggccgttgcgtcacgcgccctccaccatccctgcaagcccgtctcaccattcccctgaaacgaggctcaaagaagaaaaaggggtcgccaggatcattggctcaggattctgtatagattgcgcttcatttcgcttgttgcaacacgcccccccggaaaatgttcgggctgcggagggtccggtggggagacgggaatttctgctatggcatttgccgtgggccgtgggcttccgggcttattggaaaactgctaccacgatgacaatttggcccccaggtctaaaccgcaggatttgaaaggtttcttggggctttgatcgtctaagggtaacaatgaaatagaattccgaatgactgggttctttgtctttggaccttagctttgcgggaacgattgagtttggcccggatagatagggttggtgtttacagtcggactttgtatacggagaagtactggttttctaggttgtaggttgtccatgttgtcaatacatatttgcacatgttaatctaatttcacaaatagatcttctcaaatggttcgcggatctcgacacttcaagcggggcgcatccgacgtaaccacaagcttttccaaggttgtcaacttcagacttgcggtttgtgatatctccatgtagtacctgtttcgtagatcgtttgacaacgtacggagtacatcggttcgttcagcggtggatctatacagacaactatatgttgtacaacatctgtgttactacagcagtataccagaggtagtcgctctgcgattttcgaaatctgctaagcaaaagattgtacagagtacagagtaagagtaagagtgtgacagcgtaggcccaaacggtttcccacagatcgggcaccatgcgagtggtccccgatatctaaagcccgagaagatggcccaccaatcaccgtctaagctgccggtgtgtcatggccgagcaaattcaaattcgagggattccaactcagactcagatttaacttcaatctcctcgatcgatttcctgtagcccatgcaagttgcgtcacttggactgtcacggagatcacgggttggttccttacgcctccatcttagactgtgtctgtactctgatgatccacctcgtgttgtatcaatgaacatatcacaaaagttacatcccattacccaaaagggaatggaaaggacgagggtggcgatcggtgaacactggctatagctagagaatgtagaatgatccatgatgtactcggcaccccacacggagtactccgtactccgtcagctttgcacgatgattttctctatagacttgcacgtcagcgtaagcgaggcgatcgttttaataacatccgaatcggggacaatatattgtccccacgtgacccaaacggcgaaaaagggggccacaggaacgccgtgcttggacccctgcaaagccatgcggaaggcccgacagtcaggaaacagctgcgagaccgttcgctccacatttagacttcttagtgacgggtactccgttgagcttggatagatgggttccgggtgtttcctgggagtgttggtgttctagttgtgctcatgctcgatcaagtatctagttacttactctctcttcgtctactgacacactcctccaatccccgtactcaaacagccgatctaagctcgagtgcacggggcgacgtgatcagcgatgatccctgcaggccgacagggatttatctcaaatacttgccgtgtctctgattggcgaagcgacagggggggggaacaatagtctatcttgagtaaactaagtcgggaaaacaacaaatcaaaattaattaaaattcaaaatctgacaggtccaatctcgggtacaccctagtcgatgttgcattccaggacgacgggttcatcctttcagaaacggcttttcccaggagtacggaaatccgatctggccgtccacacgaggaattgtccacatggctacacaagaactttccctttttgtatttttgacttctctacaaccgtgttccatggaatatacagggatacaaccttggaagcccaggggaaaccaattaatatcttttctccacactctcagttttgaatctatagatagtcccgttcagaggttccaatcattaattaatggttaatctagacaggtggaatagatgaagtgatcgaatagattaaagatttgaggaggcgtctatcggttaccaaataggaagtcccacactcaccatgacaaatacctgggggaccaatcaacttcccagttcttccatatggatctatgcaggtaaggtatgcccctggaggatggaaattacaatatatacgcattcggtacgtattgctgtatttttaccctcccacagtggctgtgctcacccaagggttcagagccataccgtctggtgacaaaaaagcaaaaaaaaaaggtgtggcttgcctttcaacggtttccaccggtggagatctcctctgctgcgacatgcctaacggggcagtctggaaacttcgcactcgtcgatcctctctttcgatccgatctggcgttctgatgcatccatccattgtttttttcttggtacaccagtgtttggactagaaatagtcggtgggctgaaggggacgggaaaaatagattgacctatacttgcgccgttacggtctgggaacaattcaagatatccacatgcgcagattagaatggataacgtcacgtcccgtgtctttgcagctgtctgaataaaaacgacatcggctttaattcagtttccgcccccctccaggcgtcatggagggatccacggtcaactgtcagtgacaggtggcaggtggcccatgcttttcgtttaatttagtgttcttttcttggaaatggattttgataatataaaaagatccaggattaagcgagcctcgaccgggatatagaacagaaaagcaaaaccgtcacgtttgtgatggggtccaagccgtatggaagacagcctgcaaggcatatcacaatgtgccatggaatccgtagatattgtacaagctgatcgacgtcttcacgaatacctcatacctcggggttgttcgggctagagcttttatcacacggaggccccgatttccccatactattgaatccaaaaaagggataaaaggataaaacaataaaacaataaaagaattcctttagaaatttgtcaaactcggtccaccggtccactgctccaccgtggatcatcgcgaggtcgagaaggaaccctggtcgagccaatgagatctcggccttgaccgatggaacatggatcggatatgaatcgaggaagtgttgtgcatggctggctgagtggaatctgggacgtctaaccgcttgtcactcggaagctagatctgcccctggctgtttttggcgtggtatgccccctttctgctttattgttttattgttttagttatattattttatgttagatctataattaattcgtaggatattgtcttagttgtccaattgtcaaacgactatgttgtataccagaatcgaaggctgcttctataacttgcaaatccaaggagctagaaaatcaaaacagttagcgccttgatgatttggaattccagcaacggggctcagggtcgatcactccgatctttttctgctttacgcgtctttcctcagcccgaattcccgggtggtactgaagatcctaacggagtatttttccactccccacgatctatagattacaatagtgtggtatttatttgattttattttctacatgttttaccttgcctgtattattccgaactgtcagctccgagatcttggatcgtgatcttccatagcgggacctgtatttttttcttttggacccgtccccctggtacttaagacttgactactataataacctcttcgtctacttatacttcaactctctttcttctatcatcatatcatcaccatcaccaactaccaccatctaccatcatctaccaccaccattacatctaccaccctactactctcataatgcctgcttcacaccgtcgtggtccttgggtcccagaggaagaccaactcctcacccaactagtctgcgaacaaggccccaacaactgggttcgcatctctcaacacatgcactaccgttcgcccaagcaatgtcgcgaacgttttcaccaaaatctcaagccctcgctaaacagagaccccatctcccccgacgagggcctgatgatcgagcgcatggtcaatgaaatgggaaagcgctgggctgagatagcccgccgcctcggcaatcgcagcgacaacgcagtcaagaactggtggaatggcagcatgaaccgcaagaagcgcggcctgtccactcccaccacttcccgcacttattcaggccgcatcgaggcaccctacacccgcgcctcggcgatgagcccatcgcgctctcgcttctcttcttcctctcgcccctcatggacagagtccatcgaatccgctatctctgaacaatactcccactcgcgccgagaatccatggcttcttccacccgccatctctcccccatctacacactcccctccatcaaccgaccaatcgagactcccctcacctcgcctgctttctcagaggcttcacactccacctcttgcgagccgccttctatggtctcagaccacaattccgtctgttcttcttcgccccgcactttcccctctccgcaactcctgcccttgcccgtcgacctgcgctcgcagtacgagatgcggaggcccagtgtccacgttgtcgaggactcgcccagttacccggctcgctcgctcgagtctctgtcagagatcgcctccacgcagcgctggattggccaccagcccaccctagcctcatggcaccagcctatagacttgcccaagtcttggatctccaggtctgagcctactcgtgacactcgaatggggttggacaatttgctcaattgaaatatacctcacatcatgattgttacgagtctcatttctcaactctgttttccctcgctctatactcctgattccccttggcgctcgggtccatcgatggaacccttcctgtacatttgccgaaagctcctccattttctttgtgtctatgctctcttatagggaggtattatgattttcttttgtatatcttaatgtgtattaccatgtcattttcaaagtctgttcttttgggccttcgtgctcggttctacgttgaatgattattttgcctattttgctgtttgattaggcacgcagtctgggctctctatttctgcatttgggatcgcataataccctgtttatagtaaggatctaattgaataactaataataataatatctaagcatttcactccctacccaaatctgcattccgaccctcctatacacagaccaccgcaagtcgcacatatacgaatgcctctgtactcccacacctccccggttccagccagcctctcgtctaatattgcagattgcaggcatcagggaatgcagtcatgcagcctccaaccgtttcgctctcccctttgcacgggtccccatgaggaatgcgccaccgggcacacgctgtgctcacgaggacggacgcaagggatgtgagagcatgaggcggccctggttctggttagggcctacgcacggaagtaaggacccacccgtctgtctgacaaggcaaggtttgggatacagagatggaacgtgggagattgtagattggaacttgtatagtgtctatgtattgttgcagatgacgtgatgattgatgtttatgcacatgtatactagattccagctagggatggccatttcgttttgggaaataggaaataggataatacctaatgctgatgctgatgctgatgctggctcatgtatggcctgcatccagaccatcacgtaatgcatacatgtacataatgcataacccatgaataccctgcacagtggcaggcaagaatcagacccggacatgacacacacctccaggaaacaaaagaagtctattcgagaggttcgtccgcgcctgcaggagaaaatggaaaatcaaacggtctggcaccgtctcgatctagagtaagattgacattgacggatccactagaggaatggaggatatgtggggctgcctaagctgcctaatacaacgcattaacctaaaacgcagagcgagagagagagagagacagaaagagaaagagagagacaaagagagaaggatgagcggggaaagaactatattcagtatgtacatattccgtataggaactaggatcaacgccacccaaccaggccagggtacggaatagagaccttgattatcccgcctatccgccccatttctctgtgaatgaaaccgatgcgctacggtggtgtttcgctcggatcgcccaggacgggatgagcgttgggacgagagccaatcagcggaggggtcgtgatgcattaggacggatttgtcaccttctgacgggatgaacggcggggctcttggtgttgcatggatcgtggagatgttcatgcaagccctctgttttgttttgttttgttttttttttttctttctctcttttgtcgggtctcactttccgcttcccccgtgaggctgtttggtgcaggttgggctttggccgttgagatttggtttttgatttaatttggtggttgggttggggtatggtaaccatgtttatgccgtttcatcgtggtatttgggtctgtttcatttgatctgtttcgagtccactataggattatcatcgtctattctatcaaatcatcagctccacattaggatggcgagatgatggcagctatcgcttccacacaccatctcgaaaataattgatcggatattatctaccattcgtcgaatcagatcgagtagattgacttccgatgtgataggacacagtagctcggtaaatcataagctaattaggaattctatcttatacagtaccttgtatttcaacattggcattgtgaagatctgcaggctcccagtatgtattgtgcatcttttggcttgcataccgtccatactgtttgtttacttaccttttgcctgtggatccgaatgtgaccgtggaactcacacggcaggaaacctgaatctcaagggcaaaacaccccaggaaactctaattccttgatccaaagcatagggcaaagaaagttcaaggactgccgctaacactgccctgaccaccgcccggcacctgcgcacgatggccaaaatgaaaaacggcgccaaggccagatcagatcgtatccgtttatcagtggatattaatatacatagcattagttaccatgggagaagggagcaccgtgccaaatacatatattcatccatggtttgccatacacacgttgcagctcgaatccatggattcattcttctgccgttgcattccaagctcccgatcctgtgatcgacagccacatcgccttatagagcagtcatgccgggatcaattgtgggatccatccatatgcgcaagagctgagatcgagattcggacaccgatagattatcagcatccatagactttggatgttactttatttggtattacgtctgtactgataatacagagctctctgattggcccacggagaatctcggtgtaatcccacgccagtcctaaaatagctctagcgcagaaaggtacctgtctgtcggtacgcacgatggctgccgtcccctgagcatatccgcggacaaggtgtgaggtgaccgttcctcgggacttttcccgaagtcaaagcctccattttccagtgctgctaaccgtgcaagtcccttcattttcctttctgggtaattcgctccggtggcggtcgtaggggcttccggcgctctcttaggggcgccagctcgcgtggcaggaatccgcaggattctagttgacagggttgtttgaagtctcttgcttcattgggatgctctttctgtattgggtgttttttttctttgagggtttctaacggttgcgtaattgtttctgggattttgagttcaagtggagttgtttatggagcccgtactatctatcgtcacgcttgtactccgtagatgcacaaccgacaacctcaggggttattgggattattgacgtggtccttcctaatacggttgaggagttttactttgtgatgggattatagtttactgggacaatgcttagcaacggtggactagcaaatgttgatatctagaaggagacatggtaagtcttcccctttactgccgacagaagacaggcatactctgaatcggacattcgatctcaacatcgcgaccgccctcatacacagtatcttttccgtcccagagcttccacgatgccccagccggcagatagaccttgaccttgcgctgaccgggctcaaacacaggcacaaccaagtacttcgacccaaacatatactgagtctcgacctcccaagctggttcatccgacgggaactcgtaaaacaaagtcctcatcacaggagtccccttctcatgagcctcccgcatcaacccgcgcgtgtactcgcgaagctgctcgcgaatcccaatataccgtttacagatttcataaacctcatccccatatgaccagatctcattatccgccccgctagccgtcggccgtccctccggcttcggctcacggtcaccatgtagccgcatcaccggacagaacgctccccactggaaccatctcgtgaacagctcgcggaacgcaggatccttggggttgccgccgtggaaaccgccaatatcggtcgtccaccatgggatcccggctagccccatgttcaggcccgctgcgagttggttgcggaaggagctccacgacgacgcgatgtcgccgctccacacgagcgctccgtacttctgactgcccgcccatgcacaccgcaggagattgacgatgttcgtttgaccctctgcggtcatgccttcgtagaaaccccgggcgtactctttcgggtaggtgtttccgacctgcaggttgctgccggcgtggtagcggtagatatcgaagtcgtagatcgagtactcaggctcggcttcgtcgagccagaatgttttgatacctatgttgtagtagttttgcttggcttgactccagatgaactttcgggctgccgggttcgttgcgtcgaagtgtgtgatgtcgccatcgcattgcatcgctacgcgcatgccgcggtcgtgacggatgagaagcccttgttcgagcatctctgggaagttctcggatgcattttcaacggtgggccagatggaaaccatgagctcaactttgagctctttaagctccttgaccatggcctctggaatcggacattgttagcgggtcgtgctatcgatgtaaaaaagagaatgacagctcacccggatctggccagaactccggatcaaagctccattctccttggtgcttccaatgaaagaagtcaatgacaatcaaatccagaggaacctcgcgccgccggtactcgcgcgcaatttcgagcagctgctcctggttcgtgtagcggagcttgcactgccagaaaccaaggccatattctggcatcatgggaacataacccgtcactttggcgtaggcttcttcaatttccgcgggggtgtcacccgatacaacccagtagtccaatgccttggtcgaatacgcctcaaagctcatgatatttgttcccagaaccgcccgtccaatgccggggttattccagaggaagccgtagccgagcgacgaaaccgcaaagggaacactggcctgggagttgcggtgcgccagttccaggtccgtacctttcaggttcaggtagggctgctgatactgtcccataccgaagatcttctctttgcgatcgagagactcgaatcgcatcgtgaggtggtagtcgccgcctaggattggacgcatctcgcgagcttcgatagtcagcgcgctgcacttggggtccattggatccaggcggtggcgggcatactcctcgaggagtttgtttcccttcgaatcgtagacgataatcttgcctctgcgtgacacagttgctttgatcttgccgtttgtaatagtcgcttcttggtcagtagatatctcaatgcttaggtttgggctgggtggcttggaggagagggcccaatcttccattggaattgacgcctgtctcgttgcacgtacgcggaaggcattctctccccatggctgcacccagaggatatggtcgtcgaaacggaagatgagcttgtcatcttcggtgtagagcattttggtaaaacaagttgttagtggtattaatctacttttcctgatggaagaagaggcgatttgtcttaacagatgagctgtctagttcaaagagccgggaattaagtattgagggaatggaatggtacccctcaccatgcaatcctgatgctgtgacagggctaacaccgatgacaaggcagatccactgcatgaagtaccagtaacaacactcatttattcgaggaaacttctaagatgcctcaggggtggtgaggtggatatgtgtacctttaaacgcctcgagatcataggtagcatccgtcacgagtttagcctaaagtcggccttccaaatagagcaaggacatgactccgtgtcttccaaaagaggaagtttatatcgtatgaatgaagctgccacttatagtcttcattatgtgctacctatccgaggaaaatgttcaatgatagtagatgtagaaaaagtcattagcaatacgagaaattctttatgtgggaagttggattggaaatttaggcttgggagctgcagcatatacaagccattgtgtgcatatcgatgttaactagttaaatgcctatcgaatttggtgaatgagccaacgatacgtcttttatcatgaacaatatcaccacaagaactggttcttcggtaaggagaaataatcaaatatgtggcaatagttaggagttagcgaccctttaagaaaggagaaagagaaggcatctcttctgatccaacggtcatttcagctaacatattaccaaccacaactttgaggtaagactgctgtaggtaggccgatatcacagaacatgagtatatgagatgtagggttatgtaggattactacgatgtgctattatccttccgtggtctactattgctacgtattaacatattccggaatctcgtggtcattactgactactcagttctaaacttcataccttctttatctgaatttcaggagatcaaagaagcccctagttttgttctacaaagagagtcctttagcacataaacctatggcagagaagagatgttagggcttaaacaacttgtgtataatgcaccatggctagatctcaattcatatggtctatcagttttgttggaagataattccctgtgtttggccaatttatcactatagtcaaaatttgactctcactttcgccttaattagacgtttataagccaatacagcgtacctatgaggtatagtatttcggtgccgagagaccatgttaccatccctgtcttccaactcttcttttttgcttaaactttcaagtatcaaagcaaatcagcttgagctcattcgtaattcatcatcagacccaagattcaacaatactaaaccgttcagacgtccacgggaggttccttgatattgccggctggtgttccccggaaaaaggacgctattccttatcaggacagagagtcaagctaccagcgggcacggttttcatcttgcattgctcatcctatccccttaattgtcaatctcattcgaaccgctagctgagatcatatctgagccttcgattcatccagcgaagcctgaatcatggcattcagcggggccgccgaggctcctaccgcggacatggacatcgacatggacctcgacctaggaccagagcccgagcccgagctaattcaggtggtaagggtttgcttttgtctttatagctatagtcgattgtcaactaacatgtgtcgagtgctaggaaacaactccgaacttagaaatcaccgtcgaccccctcaccgatgaagcggtctacgaaaaagtgcatgttcgcggtgtcgatgaaatgaccacggagaatatcaagcaatttgctcgcgactgctctggacaggagccagtgcgcgtcgaatggatcgacgacacatccgccaacctcgtcttctcctccgccgaaatcggcctccaagctctcacagctctcacccaagtcgccgaggaagaagacgcgtctaccttgccacctctgcgtctccgatcggcgaaactcctctcctcccaccctgattccgtcctccaagtgcgatcggctgtcaagtcggaccgcaagcaagcacgcgctcatgagaagagtcgcttctacctcatgcaccccgagcatgatccccgagaacgcttgcggcaagagtttgcggacaggagacgtagcgatgatgcaggggatggcgactacagccggcgcagattcgacgaccgggagcaccggcgccgccgagaccgcgccgaggatgaccacttcaatgcggacatgtacggtgataatgttggctctgaacccgagcgcgctcggggaaagcctagaggtcgcggccagagagagctgttcccagatgccgagggccgatccagtggacgtctccggaatcgcagtgcgtctccaggacgagacacgttggaggaagaacttggagttaatcgaggcggtggtgataataacaggcggttccgtgagaggtcgcctagaggtcgtaagaacaaaagtaaagagcttttcccaagcgcgagcgagagcgagtcaggaaaccgcgagcttttcccaaacaagcccacatccagctacatcaagaaagagttgttgcccagcaaggctagtcaccatcgccggtcagatgcattcgacgcttcttctgccccgggcacctctgaacacagacgccacagcaatattgagctcttccctgattccaccaacaatggcgcccgcattcgtggagcagccacaaccaccgaggaccaaggatttgccatccgaggcggctcatcgagcggcatgtcgattaaaggcaagggtgcgtcggtgcgcgagctgtttccttccaaatacgacaatggcaccaacaataacatcaaagttggcgccaacgctggcaaggaattgttttctgagacactagagggacgcggcggtcgtcggcgtcgggctgaggatatgttcagctgaatagactaagcgataggccgagaacttgtgcatttgcttgattatgaggcttcgggagcatggtggatatccggcgtttcaagaatgggatggggaaatcgattgtctgataaaagtttcataatgaaacatactctgctctgctgatgggtggaacccgtatattttctgtaatctccaatataacgcaaaagaagatatagaccaaagtaacattagttgagtcgtgcatgggaatatatatacaagtcgcgttgtgcgcgactaactctccccaaccaaaatccttccgaggcatcagatacaagcatggccacctccagaacaattgatgcactagcaagtgctatagttgcgcgattcctgcgcaacaatgactattcagagacactgaaggcttttatccgcgaggctgaccttgctcctgacgtggggcagacctcgggcgacgacaccaacaactggaccatccaaagtttgcttgaagagaagagcacatatgaccaaactgtgaattttgaaagatatggaaaaggcaatcagcagtcgactttatggagcgagccaggtgggttttattccggaatggcagtcgaaagtcattgggactcggcctagctttaactatcagcggttgcctttgttctggtatctgacagacttctagcaccatcaagaccttctatcatccagacaccgacatcatcaaatatccttgctgcgtcggtagagcaatggcagaaaccccgcggcgatgccgatcaagtcgccgcagacgctgcaccagcgcagtcgtatatcgtctccacgggtgcagacaggcaagtacatttactccagacggcagaaggtaatacggctgtcaaatcattctcgggaatctctgattcgcctgttctatcggttgtctcgatcctccagggccagtacatcctcatgaccaacatgtctggacagctgctcctccagcatggatcccaaacactggacagcaggaaggaccacgcaaagtacgcagtgaaggtggtagtctacaaagacaaggctgatccttccaagtggtgggttgccaccgccgggtgggacgagtgtgttttcttatattgcctcaatattcccgacgaagtagacgcgctatctctcacaattggtgagcccgttgcacgcattaaactcaactcaaacccggattcactattgttcgtcccacacgtggacaccaacgagctgctccttctcgtctcgcgcagagactcgacttatatctactactaccaggtagaagcatcggaagaaaccgatactcgtgcaaatgatgaacccgctgccgagaagtcaccgcgggaagctcgcctccttggacagcagaatctggccccccattccaatgcctgggttgcgttctcgccggtccacatggcgctcagtccacacgacccaggcctcctggccgtagcgacgtcgacattgccccatttgaaagtgatcatcgtgcgtctgctattccctgcaacgaccgcttcagaggacccggtgacacaggcgtctcaggcactggcaacactggaactgcagaaccgtgaggatgctgctatcctcgtgcaggcaaacaccttctcgccgcaaactgcttactccacaccgcaagtggcatggcggcctaatgggtctggcatctgggtcaatggagatgatggtgtggttcgtggcattgagacgaagacggggaagatcattgctacgttgaagggtggtcatgactctggctttaaggtgaggactgtttggtcgggtcttgttgctgtaccccaagaagagggtgacccggtctgggaggaatgggttatcagtggtgggtttgataaaaggttgattatttggaaggtatgacctttgtgactataccgaatatccaggccaatacgagtgtcatggacgtgaaagcaaatgtgaagtagaggtaaacgaattgatttagacataactaaatataaaaacgactgttactgtctacgggatgtagcccccctgaccatgaaccctgtcgcatcgagaagaatcaagacaggatatatagcaatcggggacttgggggttcttcttggcacgttaagaaaaaatccttcagcaatcgcgcatgagaaaagcacgcagctgtacacacatatgccggacgggagttctgggaaaaggggagaaactaagctcaagggccacaacacagacgaagttgagtcctcgggtctagaagaaaaaaaaaaagaaagggatatagcagaagagattccgcttgggaaaatggcaccgctgtgcacatcgaattaagcctgttgatttcctgatatcaaacaactcgaggctcgtcgcgcaagaaataagcaaaaatcaggcctattcgacacagcggaccgtccttgatcgtcacacacgttatgttctctggacctcttgcacgctcgagttgcatttcatgtttcccatttttttaagactgagttcataatctatgcgacctcgcgcttgccctccttgcgctccttctgttcaatgtgtcagtactccgttccataggtaatggatggtgggttcgggttgtggtcaacgtacaagggccttcatggtgccgtggagagcgtgacggtggttgcggcggaacttggggtcgacaccgttgagggaagggtaacggttggtcttgggcttcttgatactgttcggacaaatatatcagcgactcgattcagggtgagatggtgtggcggatggtggtcgaatgcagtggttcgaagagattgcccgggcgaatattccaagtcgttgacctcaagattcatcacgccggataaaaccattcgcacactagcacttcttccaccatgttcattggattgattgaaaaatgtcggacaagtgtaatagtagggtgaccgaggaagttcaagggcaaacgtacccgttacggtgagccttctggctgctgtggtgctgggacgcgttcttggactctgtaggtgaaaatcatgtcagcgccatcgcctttttttcttctctctcgccagcttgcagaggagcgaaagtcatagggtcgtggtaaaaacgtactggccatcttgtcggatgttgtcgctgattgacggtgatagatggagaggagtgggaatagggacgtcaggcctaagaggctcggctagggctcgttccgtttgtgggatctcgcttattgggcggtgtacatactacagcttcactaggtgacttcttacttgcaagattgtcccagaaaacgttgtgctattttgattggtcttgtatcctgttatatttcattttgccgttctacctggttggaaatcggggtctttttaactcgcttttagcagttcttcagtccgcgagtttttctcccttcattctgccacttaatacacgtgacctatatatatatatcacgtgccagatacttccaatgctgtctacgaggtattgaagaagagatttgatttcggaggcgacttgatagtagcaagtgcagtatacagatacaatgtattgtgcctgattactcttagcgagaattcctgcaccaacttgttctcggccgcaaatattacattaggaatcggagttctggcaggaacttatattctaaaatggataaatactaaaatacatagcacaggaattgaatatgtgttctctccttgtgttctcaaaatatgcatacaatgactgtagccaacgcagctcatactggccatggtccggccgttgaattcccgtgccacgtgacccgccgctagggaacaaccggcattccgacttcgacctttgcaacgcaacttcaagacggataatccagcctttgcacgtcatccaccactgcaaaatgagctccttccgctttgctcgctccgccctccgggctcgcccttctttcctcggtgctcccgtccagcgccgtggttacgctgaggctgtcgccgacaagatcaagctgtccctgactctgcctcaccaggtacgtgaacgaagtccggccggcatcccaacatcatagcctaagtactgacttgataattgcttgacagaccatctaccgctcgactggcgtgtatgttatgcttccaattgcgcccgcgtcgacggtgcctccgcccttttcctaaatactgaccaaccttcgcgatcacagtacccaggtcaaccttcccgccgcctccggtgagatgggtgttctcgccaaccacgttccctctatcgagcagctcaaccccggtctcgtcgagatcatcgaggagagcggtgctaccaagcagtacttccgtacgtccgatctttgcgctctgaaacatttcgcaaatctggtctcttgtgaattggaatcaatcgactaacaacggtgctactgtatagtgtccggtggtttcgccgtcgtccagcccgactcccagctcagcatcaacgctgtcgagggcttcccccttgaggacttcagcgccgatgtaggttttttttttcctttccaatgtcgcgactaaagcttactggagcttccttactaggctatccgcgcccagatcaccgaggcccagaagattgccagcggcagcggcagcgagcaggatatcgccgaggccaagattgagctcgaggtatgaacccgcgggactaccggactggttaattactgactttccttttcttgaacaggttctcgagagcttgcaggctcacgtcaaataaatttgatgtacataaccattatcgcctaaaccatgaacctgtagaattatagcagttctcccttccctctaattatacgtgtttattatatctgtctacattctatgcggtagaggcgggagcgcaccttccaagcttggaagttaagcacatgacttgcccatttcatctccaatccccgacccgacggtcgactgttatcttcagctgaccgtgcaaacatggcattcgccaaatcactcaagtcagaccctctgggcatggtggatactcgattgatgatgacggactcaccaatggatggtttcttttcacctctctttgcgccattcaccgggcttgatggaactgacgaaagacaaccaagcagccgccagccagaagcagaagcaagcccgaagcaagctcacggaagcgtcgaatttcgcgagtctttccgtggtttcgattccagccgaaaatgtcctcgacttgagttggatgtcgctgtggataagtaccacgctcttgacggtctcactgaaccattgaatccccaaaacacccccgcatcaaatagcgaacgagggagcatagaggaatctactgagtcgcttcgatgctataaaatggagaacgtacagacgagtcctgcgcctgggacgggggagttcaatttcgattgcttccaagattcgccagaggcaagctttgtttatcaagacgacggaagtgaatctcctaaaccctcaaagttgcgacgcctttcggttggccgccgacagtggatcaaacctcctgttactgccctggcgaatcgtcagccaagcatgaatgccggtgacttcaagaaatccagcaattctggtccactaccgcgatgcgttcgattttctcctcctgcggcctctctgtcttcgccttctcgtgcgacacgtcgtcccctaccttcgattgaaagaagacaggattatgttgcttttcatcgacagaagaaacaacaccggaaatggaagatcactggtcgcgcgaactctcgaaaaagctcaccatgcaacatccctacaaaaagaatcatcccaaagaaccatgatctgcgtgactcgtctctttgcagcttaacctatcgtgaaacaggtcaaacaactctccccgctcgtgttggctcgggtagtgatgcccgggaagtgagagccggcaatgtgggcgacactcctgttgcagatgactcgaaaataacgggtaacaccgagcagaacatccctgcatttcttgctgtttcgttttcgctttacagaaccagacctgcgcctagctcatccattgagaaagcatcaaagtacgcattcaaatttcgaatgactcgaactgatctccctcagcaaccttctccgcatttccctaccgaatttgaaaacatcacttgccacccgatcattgatgacttgctattacacacttgcttcatcatcccggcgcgggttgtactactacctctcaatgtcatcttcgttgcaacatacccattgacaaacacccgggtcggcgttgtaatgctctaccttgccagagctttactgtatctactgacgagaaccatccttcttgtgttgtccaagtgcggagtgtcttgtggctgtcagtggaacccggacacggccattcggactcagtagcttcacccttagggtgagcaattgaggttgaacaagatcgaagcgacatgtgcaccagcgaattccgttcgtatttcctccaaagacagttttatgcagtattctacgcgtaccttggttcacgcgggtgagaaatgagtttagtcactatttgatacatttttgtggccgaaagccgagttatgggtaggaatgaaacagatttttccagaatggagtctcttgtattagtttttagtagagaaattcccactgaactaaagtaaatgagatgagaggattcaattgacttatagggactctccatgtctacataggtcactatcatgacgggctaccaagcaagcagttgtcaagaaggatgagagataataatgaaacaaaatgaattcaatctacacatcgatgcacacccccagagctaaccttagcactcgaataccttgctttagaataaaaaattcacactttaatttcttgcattacaaaattatagaatcgatcctatgcagtctcttctcgctttgaacctccattgattagccttaccacagcatgttaatcttagcgaggacaggccgcaggatatcctgttttgagctgaacatgagatagtcagaaattaggcgttagattatttgtgagggcttctaatctccgtgaacaatgtccgagatcatgggcatctatacctaaggttcaatgtagggtctactgcacagaatattgttcgatattaaccgcataactctctaagctgcactcggttatgcctcaggagaaccccaggaagaataggacagataaccaataccaagaccgggtatatcagcacaaacatgaagacaagaagaccagcaaaaagctagctaacaacccaataaaagatcctttaaatcgctgacatcataaaaataggaatgagaaaggaaatgctaactaaaaaaatcatttcgtcgcctcaagagcacatttaagaaagatggaaaacatatcaaaaaggcatagtaacgtgacataaggtttggggggagggggtcatttatatcaacacggctctgaaggacataactcgttttgtacacgtcgtaagctgagtctgtagtagacacaagagagaaaaaagcagagaactctagacggtactaagaaagcgatcacgtgaattccacaccgtgctgctgctgcctctcttgtcgggtccgggctcgttcagcacgtctgcggcgacgattgttcgcgtaagagccgctcatctcagtaccggtatatgtaggcgaagtgacactgcctggcccatatgggttgctggaaggcgcaggaatgggaggtggcatgctgcctgaaggtgcctgtggaggggcaaggcgagcagcagcagcagcctgttcacgtcgcatctgctcgtcttgttgacgttcgagttcttcaacgcgacgccagcggtcgtggccggcgtcttcgttgccagacaaggagcctgcactgctgttgcgacgtcgagagcttcttcgctctctgcgacgggcctcacggctcgcggccgcttcttcttcggtcagccgacggagtgtcacatgtcgtccgtcattgtgcattttcactttcacagataccggcggggaggcaacgtcgtcctctcggcgccggctgctgctccgattacggcgggcggctgcatctagtgctgccccagcagccgcacctgatgcaaattctgctccatcatgggcgagagagtgacgtgagtgaggatcttcagagaactgctggtggctcgggggcataggcggcatatctgatacaacgctatggacagcaccagaggcgagtggctctgcagtaagaagagattctccatgtgatgcgtgtcgaggtggaggacgggacagatcggtttcagtgagatcagtttcactatacgaactggcccttcttcgtgggtagaaacttcctcctgtctgtggccgtcgtttgctgtttgctctctgcagcgcctcatcttcatcttctcggcgcctgatatcttccagccgccgtttctcttcatcgtcctttttaccgcggctaaacagtcgcttcacggcagcaaaagcacctgcacccagaacagcgtctctaaccccatgagaagcgtttcgcttaggaggctcagtgagatatgtgctgttgtaatagtaagacgaccccgggctttgggacctgcttggtacacggctcggtggtcgattaaggggcgtgtggtgtgtcggctccggtcgaccatcttctatcctgctgagagattcatccgtgtggctagtactgcgcgaatgggcgggtctgtaacgacccgattcggcatcatcttctcgcttttttcgacgattccagaaattcttggccatgagaccagccccagccagtgcaccaagctcgaggagtttcttgccgaaaccaccaccaccatgatgacgggaagcttcatctgaatatttttcatcagagatagatgtgcgagagtcttcataagcatggcttgggtggcgactgcttgaacgccgtcgaaacattgaagctaggccagcacccgcagcgccggcggcgagagcttctgccgcatgattgccatggtgctctgatatctctgaaggtcctgtataatgactgcggtcatcaccgtggtcacttcccatgtggtatccttcaaagtcatatcggtaggaaagtaaaaagtaaagaaccaagtagccgaaagctgtcagcgcgaataggatgaataggacctttggcgaaccgtagagcgtgagtcctagtggaatttgagcaattccgagaagtagaagtgcacgacccagccaccggtgaacctaagacatgttagaagagcccttatatcccttcttgagacttcacttaccaccagtttcaaaggaacgtgaactcgccgtctcttactctctttcttgtgcacaaaccagccccacagcacctgaaaaataaccaaaacatagattgccaggccgattccatgatgtgggttggttaggcttctttgtggcccaacggcgaaccacccaagcacaaacacaaccgtggtcaagagcagggtaagtacctggcaccaagcatgcaatttgaatgcccagtaaggattccatcgggagtaatatcggattatgaaagttgatattgggacgatgcccaagaaaacgattgttgcaatgacgccgtgcgcgatgattatggaatggtacccggccatatccttgaaacggttccccatgcctgtaaagtgtcagtcattacaagataattgaaagggtgtacaccattatgaaagccgattgttgatgcgtccgactaaccattgtatcgcatcgtctcaaagttgacccccatcaaattgggcagtaggaaggtatcccgcccagagtcccaggtgccatccccaacatgaagggtattggatgaatatgtgctgctccctgcagcggcgagatctgagtttgacattttgcggataattctcgaatgaccatgcgatcttcagtctggaatgtcagatttaccgaaggagatctttcgagatctcccgatccgaggaatgcaccatgcgataatgggatcgagatttcgactggaatgcccaatgacagtcaacgaaactgattgtatgttgaccaatttatgggcgctggactgatcgtatcacaagatctaagtatggttcgagaaagccgtatagtaagagtcgaggcggagcgcaagaagagggaaagaaagaaagtcgtacggattcggatgtgagattaggataggattgaaaaagcgtccgacaacgagattgacatagaataataaagatgcatgtcacacggaaacatcgggcagagaggaatcacaacaagaggctgagcgatttccccagccatctgttttcctatgacaaattaccgggccaaccagccgctgactcagcatgggtattgtaaccgccttccaaagtcggttaggctgttgcctcgttatcttatctgccttatcctcagctgatcttatcacaagattgcgtgctgtgttcgatggagctcgaatcgttacatcccacaccttctcttcttcccccgcctgacactttggaatgagtagcctcaatccaagatgactcctcaactagagatatttattagagctttgtcccggtttgtgaactcctattcgcacccgaatgccaccgggcattatgaacatgactgactaatttaccctagctttttaggatgggcatagtaagtctacgcgttacttccgaggctatatcttatatctcatgtgacgtttgggttgacggctaacttgaacgaagtatgctctgctggtcggggtctttttatccccagccgatcaccaactggagacgcaagtccacagtcggcttatccattgatttatccaccatcaaccctctgggttttgtctgctatgcgatatatacctccgcgtttctctactctcccgtcataagatcacagtatgcggcccgccaccctgcctcaatcgaacccaccgttcggttcaacgatttcgcatttgcggcacacgcggtggtcatgtgcatcataatgtactcgcagttctggcctttcatctggggcttccacgtttcccgcttccaaagagtcagttggttaatggctggaatattctgggggtgtgtcctgtctcctctggtggttatcgtggccgtgttggcacaaagtccggatggagggtacgatccttccacttgggcgtggattgacgtggtaggtgaaaaaatctacttttcttcaatgaactcaacggggaaactgtaaaacaaagctaatatccttctagatatactcgttttcgtacgtcaaactcctgatcaccattgtgaaatatatgccccaagtggcgttgaactacaaacgacaatctacagtaggctggaacattggaactatccttctggatatggctggtggtgtactttcaatgcttcaactggtgcttgactccagccttcaaagtgactggagcggtattaccggcaacccagtcaagctactgctgggcaacgttacaatcttcttcgatgcaatcttctgcatccagcactacgtcttataccgagatactcctgacctgaagagaacatctggtccgagcgagcaatcgcccctcttggatggacaagacgatactgtgggagatcgagtatgatacacagacatccatgagacgaactagtgaccttggggccggatttgagacattggggatatgtgtctatttttgtagaggcagtggagtctgatcttggatctttgagatattgtgggggcggaaatccggaccacacatctcagcccgatcttggtgatctgacgatttgggggcttggtataagccatgatttagatacatgataaaccgtcctatcatgaatgtggtgctatatatttcggatctgagacactatgccaaggaatattattattagacggaagatattcggtctcaccaccagcgtacaatgtacaacgtgtcattctggaagcattcaggtcgaaaccctcccagacaacgtgtcgcacaatacaatacatagttataattcacatagtgactgcataatagacccgaagccacagtgaggctcacgccgatcaaattgacaccgctcctcaatttgaacggcctccccgtatttggcccccaccgaatgatgtgagtggtcgaataaagggataagcacacatttatgaacattgaccaatcatgaaaaagaacacggtctatccaccagtgcaccaacggtgctagccgtcggtgtcgtgctaaaaaaggcttactatcgtagctgaagctgaactctagattctcagatttgacatgagctcattgcgatacctgggttgcatccggatcaaccatacaacatacagaactgccctagagtgactgatcagcaagatatcaaccctagctccctaccagtaagatacccctccacgcaagagatgctaccttcggctttgacgttaccttcaagctgactcaaccttcagaaacttgaattaaaattatggggttaaggagtcggaaattaataacgtgccatagaatcgggaattatgtgtataatcttaggcataatttgtgtagtggccatgacagtgaggctcttgatatctatgaggatgaaccatttccacgtgtttctagagaacatgcacaaaagacaagaaagatattacagaatactataacacgagttttggtgatccctagcatcctgggcgtcttgtggctttctattggccagtaatacgagcgcacaacgcagaccctagaaatatcatagttgattcatgaaaccctaatctctggcagaaacctgccggtcttggtctagccaatcttggtatgtatatgtgcagacccacggcgtcatctttcagccctactttgaaaaagcctgttgtcctatagttctgaaaatgagaagccaatacctgcaagccctgagtgggtcgaagatcatctctaagccggtagacccccccagccccagtaatccagccattctgaatcactttgagtcaaccccaagaatcaatgaaacggtatcaattgatcattcggtgcattgccaataataactggtacagttaacaattctatatcaagcatagcagtatgatcaagtttcaatttcttctgcggaacgcctagacgttcaggattacagcactgcctccttgacttgagatggccataaatactccactgcgagtttcttcttagtctagaagacaagttcagctctaaatcagcaaaaactctatgaaactttggcttctcagtcttatcgggcaaaaaaacccaagcgcatggacacttgttcatacatcctttatttatgagagcgaaatcatactaagcatccattgatatgcaagagcggcggcccccaaaacacagctttgcatacttagactgggaattctcttttctatcctcagaggaattacacaacatcacctacgtccccaacgtcaccgacatcgccaacatgtatcctagtcctcagaagtctaaaagtacatatagcactgtgccggatagtgctggctactcggagtcctcagagcctcaacgaattggaggcttggtcgatgtgcctacatccagctctcacatgtccgttcttcagcagatagactttatgaatgcccagccaaatcctcggtccttcttagctcctgggcatcattctaccgggagaagggaatcgatagacactggtacaattgggtctcaatatgcatggtccactgcgtctaacgcaggcgtcctctcaaactcttctcatatgccctcctttgagacctccatcgaccacaacacaacgcctttcattcaaggttactatccccaggaatctctacagctcgctatgagtggaccaggcgtgtcgggctatactcctcagcaaatcgacaaatggtgtgttgagagcgagccagcacaagacttctaccagccacaacccttccaaaacataggctctatgcgttttccaccatcaacagaagtgcaaccagagccgtatgcgacattcaacaaccaagtcaatactgcgaacgagcagtggctctcttgcccactccattcttctgatccgaccccagaaaccttcttccaaatcccccaatccgtctcaattcctcagtcaaatcagtcagtcccagcgccaacaacccacctctaccaatccactactacgaccacctcaatatcttcatcgccaccatgctccctctccgacccagattctccaccagccgcaccgggctcggcttccggcttaggctcgggctccaacgcaggcgatttaagcaactacggtattccaactggtgacggcacctggcgttgcgcccacccaggctgttcctcgcaggctgtcttccatcgaggctgtgatctgaggaagcacttcaaccgccaccgcaagtacctcttctgtcgctacgagggatgtccccagtctacaaagaatggctttagcagcaagaaggaccgtgctcgtcatgaagcgaagcataatcctggtgtcttttgtgagtgggagggctgtgggaaggttttcagtcgtgtcgacaatatgaaggaccatgtgaggaggattcatcggaaggggcaggctggaagggcttagtaatcggcgaggtcaccatgaagattatggtactttggttcatgtttacccggcggttttttttttgctattttgtttgattggttcatgtacaacattggtaggcaaagcgggaaaaggcatggcaaatttagacaatgaacggttctgtttagcgagggtttaccttgtccatgaaagtttaaacaaaaaccatacgaaaatgtatagttgcactgcttgaatgctagacctgcgtatgaggatgtagatatgcaagtctagaattagactcgagcattgccgagtattctaccgccgtaagaagcgactaaaaatgcttgattctaattttaacgccaaataacgccctaggccagactaatatcaccacctgataataggaatattgaaaaaaggcctgtgtaatcgaatacccgtgacccgtgatcatattatgcatccgagacgtttacgcagaaatagaccagatgaaacgcgcatttcccctagatctattaataatgcaagttactcatcaacaaacagtatgctatgtttaacctccatcatgcgagttcactgctacttagtggaggctatgtacagtggcggcaggcatagagtgaaaactaaacatgaatgcgggcattgttcgattgcattttctatctagggtatccaggtaagaatttctttcttatggtatgtatgtctcgaagctagtgcaatgatccaaattatagcctttctatatcaagaccagacgaggcgaggtgtacttcgtccattcagaacctattaaacccgcctccgcacgttggttgctgccaaataccatctaattagtaaaccatcaatcccaaagaatcgtcttctttggattcgccagctatgcaacttggataacgtggctagattcaaccagaccagggcctccgtaagaagaccaacccagccaggccccggcaacacacctgcacccgaaggatgttaggggaggctgacagcataattctgagtgatgtacttggtcttctaagggtgtgtttcatcaggtaatctgaaactttgggcaacccaaggttccaaggtttcagcttcgcacgtgttccaaggttggtcttggaagcttaactctatttgaaacgtgtatgaaccccagtagttcaggaacaaaagcatttattatagatctctgtctgtagccattgggctcgcacacatccatattttgtgtagatgctcctcagtcgaagacagacttctcgccgtgcgtgcaatatccttgggtgtaattctgcgaatttgtggtcccattaacgcacgaattccctggagtccaagatcccaaccaagcaggatttccagagacaggagcgcatatggtagtcttgtttgcagtatcaccactacgggactcatgaagccaccctgtaatgattgatcgaacaagccaataactattatctgcatgaccactgaacttggtcatgttgtaatgatcagcatcaatgccgcagctctcataaccccgcagaacagccgagtgctcttcaacgatcttgcccactatatcattcatatctttcgattcgtagaaacagaagaccttgagggagaggtcgccgcaatggagcatagactgaaactcgtttccaactcgttgtacgtcgttcgagcccgggtggagagccccgaccatgtctctgtttgcggtgtggactatgttcatcccttttgcgagtttctctcggtaagaagcgagcgaggacccgtactgcggtgtgcccatgaagattatcccgatggcgcttgaagatatcgcccatagtccgtctatgtagttgctgaggatcagggcttgttggcataccagaccgcccagactgtgcgcgataaataggatgggtctgcttgagcactcgattcgttggctgacaattgcataggctagggattggctatggtcgtgcagtcgatctgagaaggtaatcgaggaaaaactgaatatgtcgacgtcgtagccgaaggtcatgatgcgtgccttggacaagtccttggaaagaagatcccggggccataaggttccattttggtgagtccatgttttctcgcgatcgccggtcaatccatggataaaaacaatgctagtttagtggatgtcagttttcatttcttctttgttcatctaatttgggctccttcctggaaagatgaactcactctaggtcagcatctgaaggatcagataataccttcatcccaattgcaccttctgtggggtacctcgacattattagctcggtacctcgtttatctattacgaaatcttacagactgtattctggaacactgggtttcgtcttgctcctgaatagcgataacctcatggtggcgaattatatgtacccgaataaaacaaacaacataagatagcaagatagagtcaacagaagaggcaaacccggatggtaagagagttttaaaattcataatcctgtcggttaaaccacccctgtctggagctgatgacccactggattacacaatgtcttaagtaaacacatttcttaacaccgtctattttacgtccatattgaaatcattacaggtaacacagaaatatgccgattaagctggctgcgttttggctggctgcgaacacgaacctccatgagaataaatcgggccggaaggtcttggtagccccacaggatcgggcgcggaacttttatatcgtaaatggtggaatgaaccgtagatgcatgattgggctcgtctcaagcagggctgttaagataccctagacttaatcgggcattcccggccgcgtggaccaaccggcatattcgggcttctctgcgtttgcatttgagatggtagagagacttgggctctcatacttgaccgttctgatgattatcgctttattcgagaatctgcagccactgggacggatatatagactaattattggatgcttcttttatcaaaagttcgtagtcgtcaatttccaccttcccactttgagaattcggattgatgaaaattgctcttcttacacgtacaatcggcaagcgcactgcggccagcaagccatcaaaacctaagccgtgatgcagatgcagtgactatgcacctaatacagcggtgggtgggttcgattatggcgcaagtgatagacggaagaaaggccctaggcctggatcattgcgataccctagggaagcacaacttggtggctggggaactcttcgaaatggtgaggccatggaaccgatagaaaagtgcgtggaattgagggaggcgggttatagtccggcacccggacttgattgaaatcaccaccaggttgatcgaaggccagaaggttgaatctcaaagggaatatcagatcagattgaccatacgcgaatttgaagaaaagctggcaagaccaatatcaagttatggtgcatcgggaaagagacttctacccgagtgtgattttgaaaagtcccaagtaaagtgttcaacagagggttcatgataccccaatgaattgacaaagaagataaaatagtaaaaataggaaagactcacaatgctccaattaaacgaatggcccatgtaacatcatgaatttctaacaatggacaggtggtatcattgcagaagcaccaaacaaaagtacccaaaggtaacaaaataaaagacagcaaaaaggtatcacagctgagaaattcgtcacgcgtaaagttgcaaagttacctcaaagagggattagcatgtcgtactgaggcgctaatctggaaatctggaacacccggggaacacaggcatgaatgtgggagagagggggtgttggagagggtacacgccggtcggaacgagtgggatagaaagagcatggacacaatagaaatgagttggaaatgcaagatgtaaacaggaatagaatgaaaaaggataaagaataaacaagaggctaaaggttcatgtattgttcatccttcgttttctcccgcgggtgctaccaagcggccgttgcgcgagaacctgtcggagaatgggatcatctttgtttttgtcgacatgatgtacacgaacatgtctgtgtgagcgtgagttcagctgatatcagattaagtgaggctcggatgtagcacgaaccgttgaagattgtcgggtcgcgggtatttgtgttgctggtctggacagaagggacagacgtagcctggggagttgtgcacgaggccatggcgcatcatttcattcttacgcttgaaaccttttccgcctagtgcgcgtggacagccctctaccgggcagaagtgtgggcggtcttgtgagtgcacgtttgcatgagagctgctatttcgttaggtgggggtttcacttgagtcgtctctttggtcttacttgaggagatattgagtttggaagggtgcagcagtgcagccagaatgtgtacacctgtaactacccagggggccattggcctggggagtggacgcagcaagcgaatgccgatcacccatactagcgccaacctgttccgtgggtgtagggtaactggtcgctggattctgggcagtcataggggaagcgtcgtacggagtctggacagacagcatctcagaatgtggtggtccgcgccagaaggacgagtgcgaggccggagaagggttggtaggtgagtccttcatgctcaccggcgagaagtgagaaaatggacttgcaggaatggaaaactttcctggaaaagtgcggtcgaatggagaatcatttcccgatgtacttgatccgggacaggaggagaaggggaagggcgatgacattgtgttgactgttggggcgccgaagtctgacaatgcgctgagagctttgtgaattgacggcagcgtttgtttattgctgtctggagactttgcaagacacgatccagaagatgattggatcaattttaatgatgggaggggaatttggggctctctttccggaggagttttgagatggggcaacacttgttggggtcgttgaaccgagccacttaatgattgaagtcgctctcttggtacaaactcatctttcaccttattatctggttgtataggcttgaatgggagcgatctcctccgggggggtttactcttatgtgaggccgagcccgagactggtcccggggctgccttgagttccggttttgattggccctcctttgcggacgaatttaacctctttgaatctctgggatcaaagtcaggcggctgtttatgattttttagattcccgggtaatggttccaatggagaaatccttgccgccgcggcaatctcagggtggtgcggagctagatactccatcagcactcggtcgccctcacgggttgagttctgaggtttcagctggttgggcttacgagaaccctctgcgtcggcttctttttcgctcgcggaaacaaatggtggtagtgtttcgctttctccatagttgggtttcatcgcccccccacgggnnnnnnnnnnnnnnnnnnnnnnnnnnnnnnnnnnnnnnnnnnnnnnnnnnnnnnnnnnnnnnnnnnnnnnnnnnnnnnnnnnnnnnnnnnnnnnnnnnnnnnnnnnnnnnnnnnnnnnnnnnnnnnnnnnnnnnnnnnnnnnnnnnnnnnnnnnnnnnnnnnnnnnnnnnnnnnnnnnnnnnnnnnnnnnnnnnnnnnnnnnnnnnnnnnnnnnnnnnnnnnnnnnnnnnnnnnnnnnnnnnnnnnnnnnnnnnnnnnnnnnnnnnnnnnnnnnnnnngcctcgccccgaggggaggggaccgattaaaagcatcatccgaatcatacatagcggatgtcataaagaaagtggcaggtgcatcgggcacctcgccttatacttggtgttggtctgactgattgaattgacgatcacacatcaataagtctgtaagatatggttagagaggggctgtaattgtgacttggtgatcggatgaatgagaagcacgagctaagtgcatacaatagaaaagcagaaaagcaagtaatgccgacaaagactgtccgtggttaaagtgttgagatgaggagatgaggggttgtcaggtcaggatgacccggagagaataaaacgaacaccagtcggaaaccaaagagacaagaaaatagggaaagtaggaaacgcaagaaaaacagaaaagaaaaaagaaacgagaccccgaagctctagactactcagtttcgaggtctgcagaaagtgcacttacccaagcggaaaggtggacgggtagtgaatgggtcccgggatgaggcttaaaagctccgattgtcactgcgccatctgcagatgaatatccctcggaaagaagcttgcaggttggaaactgtacaggaactcttgcaagggaagaaaggaaaactaagggagaagttgtaggcttcggggaaaaaaaagagaaacgagtctaagggtgagataataccacgttctacacgtgcaagttagggcccagcaatatctaccagtataatgccagtaatccgacggccaaaccagaaagaaagaaaaaaagcgtcaaccgagaaaaggagaatcaacgtccaaggaatattcgaggggggttgggagagaagacaataataatgcggctctcgctctcaactcggagctccacagaggaatagattacccgttacgttaccgtgactggtatttaccgggtttcgatttgattattcgggtattctatttcccgaggtttgtatttttgcgtctggtatttttctggtatttttcgagtatttccgtatttccatgatttcccttctcatctctcgatatcttcacttttcaacttcctctcggattccctgaatagtctccatccctcgatccggagcatttgaacttggtcgcacatacaacataagccaagggaaaaaaaggaaagaaatgatttctccaccgctactctctctattcaggctccaccagtaaacttggagacaacaaccggggtgcaactctcaagtcgtttcccctctatctctctccactcccaagtctgttatacccggctagggaacctgcacgaagaggggggcccacacggtctgttcacttttctcccatttcctatttcctctttcctctttcctctttccgtcccgccttttggtcctttttttacctttgcaacgtcagactcactgcgctggcacgctaacacctgggagcctcgagccgtcagcccgaaggatcttcaggctgtcccggttggattgtcaacgcgctgtctgcggtaaggagatcgtccagcccacgttgtttcagagcctcgttaagagacaatctttctatactactagtatagttcgatgatcccacatggtacattctacatggtgtataatacccctaactataatccacgtaactgtaatactacgctataccacctgcatacatagatgtgctgtccaaccccagtcggccacactccgaaacccctaattcccgaattcccttaattatcccagccgcatcccctcacactagtggattgtggataatcgagaatagattagttaatttgaaaccgatgcctatctgaatacctaaccctatcccaaacctgctattgaatcatgtttccttggaagtctaagaaaaaaataagaagtggagttcttcactccctcagcctcacttacacgtagagccgcagggcagataaaaaaagcctcacttttttcgctcctttgcatccaatcataatccattgaccacttgtctgcccgcagatgagctcaacggacattacacgatgcggtattccaccggtgtactttgcttctttcttttacgttacttgtacttctgtcttacaatcttttaatatacgtactttgtattttggtcttttctttttttacccgactcattacttgtatatctctaccgttttacggagtactcaatcccgctcggtagtgtgatcggatgagatggcgtacattaaacgtgatatcctcgcaggatattataccatacgttctcgaacgttggtccccatcgggataagtgcttacgtccacacgtcaggcgcgccaaaagtacttgactctagctgttctgggcttgtactccgtattcggtacataacctccatgcacacacccatagagtggggttttgattgtttcatggagagttggttctggaccagccttacattctaataagctgaagaatccgatttagattcagatcggctcatctcaacctacatgtagacggcgctagaatggaataagtgaagtccaggcctcgattctgagtatatacaatgccaaacctaaaaccatcaaaagcttccccgcaagtagtcaaatctctacagagtgtaagaagactacaattttccagcagaagccctcttcacaagctgaaccctctcccaagccccctcagcaaacggttttgccctcttcgcgtaatcactagccctcgcactactagcttgtctcccagcgaaccgggccgcaatgccctgcataatcacggatcctcggaacgcaaaaaatgcatcgccccacgccacgtccgagctcgtttcgtacccagacgtctcggcgtaccagccaatgcactcctcgcgccgtggcagccctggaacaacccccggcgcgaactgcgacagttggctgtccccaccgtcgattatgtaggggcttgtgaggttgcagaagtctgacagggggtgtcctacggtcgccatttcccaatctaggatgccgatcacgcgcggctccgtcttgtggaagatcatgttgtcaattttgtagtcgccatgcacgagggtgccccggtccagtggttgcgtgctcttttgcgagaagaacttcaccatgtcgtcgaagtgagggagttcaccgacgggttttttggtgtcggcatcgacgactgctgcttgtgctttggagatcgtcttaaaagtggcgatttggcggtcaaaaaagcctgtcggcttgccgaacgtttcgagtccgacgcttttagggactacgctgtggaactttgcgagcgtttgtactgcattcttccagctgcatgcttgttagtattgcgcagtcactgggggtttttggtgtcagcgttggagcctccatcgcgacgtacagtgctttcctctcctccccgcttatacctggcatcgctgggtcggtgaaatgccgcccgtctaggaattccatgatgtagaatgcggttccaatcacgctgtcatcttcgcacaggcagtacgccctgggaacaggtacatcggtatcccacaatgcccggataatcttatactcgcgctcaaccttatgagccgtctttgaaagcagcttgccaggaggcttcttgcgcagaacgacctgcctgccatcagcggcagtaagaaggtaggtaggattcgattgaccgaagccgaactatcgtgacaaaatattagttcgtccgtttgatattgctcatttggtgattgacggggccagactcacctgcttcacatcaagtggagtcttgacctctggaacatgttggtcaatgtacttctccaacgaggggatatctataggctggcgcacttctcccgcccttatgtcgatataaaatgnnnnnnnnnnnnnnnnnnnnnnnnnnnnnnnnnnnnnnnnnnnnnnnnnnnnnnnnnnnnnnnnnnnnnnnnnnnnnnnnnnnnnnnnnnnnnnnnnnnnnnnnnnnnnnnnnnnnnnnnnnnnnnnnnnnnnnnnnnnnnnnnnnnnnnnnnnnnnnnnnnnnnnnnnnnnnnnnnnnnnnnnnnnnnnnnnnnnnnnnnnnnnnnnnnnnnnnnnnnnnnnnnnnnnnnnnnnnnnnnnngatatctagaggctggcccccttctcccgccattatgtcgatataaaatgaggaaaggactgtgcgaaaagattgtggagaaagcgtatatatttggcaaggtgactgactgtttaaagagtaatatgtacagccaagccataaatgccggggcacctcctcggcgtgaccgggggacctcggccccagcatttcctcggcgtcaccgctcgaggggggagcggggagaaaaaacaaacagaacaaacactcggcgcgtcccagcggtgagacgcgcagaaaggcgtcgagcgtggagctcaccgcaatttttatcaagctaggggcgctttatcaattgcgttagccaactcactgcgggtccctgttatttttaccacagctctatccactcaattctcgatcttcgatcctctaaccattttgtgtctaccatgaccaaagagaccaccccgccacttcaagagaaatccctcccggcgcacaatccgccttccctgcctacctccccgctaccgaaacgatcaaagcccgacacaatgaccaccgctgctgtcacctcgatccagcagccgctgcccccgctgcttgttaagaagctcgttgagtctgcccaggctccaacacgcggctcggcttttgctgcggggtacgatatctacgctgcaaaggagactgtcatccccgctaagggcaagggcgccgttgacactggtattgctattgctgtacccgagggaacttgtatgtgacacctgtgatggggattgagattgagaaatttggcggagctctcagcttgttgaggctgagttgggttaagagtcatactaatgacgaatacagatggccgcattgctccccgtagcggccttgctgctaagcacttcattgacaccggtgctggtgtcattgatgccgactaccgcggtgaggtcaaggtgcttttgttcaaccactctgacgtcgacttcccagtcaaggcgggtgatcgcgttgcccagctggttctggagcgggtgagttccggctatcaatactgtatgttgtgaatgtgtctgacctgttttagatctacacccctgaagtgagcgttgtcgaggagctggaggagagtgttcgtggtgctggtggctttggtagcactggtatttaagggtcatacctcggtacataattggaaggacagacaaaattagataggttctaggtttgaaaagaacctagttacgattatatgcattttgagatcttgtttgactgaatgaacgaaagatacaaaaaaaagtccatgcttgattcaataatcaaatctatgtccacaccgaatttttgatatagagaggggccatcgacccggcttcatccaatgccctcccgaaatccttctatcatctagccatgccatatgcaaaagatataaaaccaaagactatcgcagctcctcgggaagatccgccttcttccaatcctgcaccttgaaaataatcttcggatcccgcaaaaaccgcgtattccgcacgagtctaacctcagcagccttagtcttgcgcaagtaatctctcttctccaattcctccgccgagacctctccttccagcgcaggcgcaggaaccgccagctccgcatcacgactctccagcgtccgctccaaaacactatgcatactcgacagaaccttgacagtcgcgctggccaacggcaaatccgtagccacgacatcgtcgggcgaaacccacgacttggtcgtgcgtagcccatccactgcagaaacggcctcgcttaggcgcgcgacggtcaacgccgcgaacatgtcgcccgtcccgctgaagaagcagttcagcgctggaatgtcgacacggaatagtcgcggggacccatcggagcgcgtggttgagccaattactgttaggaagttctctggcggggatggggttgagcctgattgggagagcttgaagagctgcactgaggtgactatcacgtgtggaacggagtagatcctgtgaatggctgtcaccgctgaagcgagagtggctaatgaagttattttgatgccggagagagtcctgtattatttttatattagtggttatgtctgggtatgaagtctgggttgcttactcggcttcgaactggttgggcaaaatgagatccgcaaaggggatgattttcttgtatgcggggactacgtcgtcgttgacatatagccggccttggtcgcccatgactggatccaggactgacattatatcagcatctgtacttgggaggaatggagagtctttactgaccccagaaaaatgacccgggcttcttctccgccttcttttgcaggtcaatgccgatagcgcctactgtttccacggctgctgcactcggggcgtagcccgatagcatgacatcgaagtctgtgaggttactctggcataggccctggtagagatctgaaatttcctgcgcggtggcacgagttcccttaaattggcggtagcctgtgtggttacctgcaattgcatgtgagtctgggttgagtgttcactgttaagaccgggttgcaacgtactgaagtggacggtgtttatggcggctacttcgcagcccagagattgcatgacgaaggttgccattgtgtttccaacatggctagagaagatgttagttgcttcactccaaggatgtcttctagatataatgatctgcgttatcggactcgaaacttacccataaactacctgattgagtgtcagttttatcacccgagggactgggcagtttcacttacatggctggcaacagccagaaccctggtctctggtactaatgaatccatgataagtctaagatcaagcagttgaattgaaagagagagtctatcaagtatgttcaatgttgctatgactctgtgtggggttcggggggggaaatgatttgccgaaattcctcttacctaattggccccaagaaccgagtttgttatcagtaaagaaataattccatgttcaattggagttagtgctaattgaatgtagtatactccgtagacatagatgtagaactgtagaatcaatcaagttaaaatctttcaatatttggaatgtgagaaccttacaggatctgatctccttccgtcaatagagaattagaaaagacaaacggtgtctgtcatttaggaagtgtggttcgggtatttaaagatatctcattgagaatagagaaatgttaccctgcactactcagcaggagcataattgaagaaccaaacagtgagaaaatgtagctgctctactgcttacgtaccgatggcaactgcatctcatctcacattgcaccgatgtctccgtatacttctcctaataaaaggccttaggctttccagaaggacgtaggggctctgctgagcgtctttgcggctcaaatagtgagactgtagcagtcgctgggttcgtactaagtatttctagacaacataggcagaatttgaaaaatggtaggccaactgaatagcctcgatttttttcacttagggatttcatttagaggagatcgagaccgttagtatgaatcgtcatgttaacgacgctagtcctttttgataggacgatgggcgatctgaatggttaactaactagttatccggttagttaacgtgtctattgagcgggaagagctgactcaacatctgttacactttcgctagtaaaataccttcatacctacatacatatataagtactatgtaggtactctgtggaccggataaggaatgtcaaacctcgtctatacctgaaaggcggtcagtgaggcagtgcgaagaaacggagatatctaaatccggcccgtctcgacctcgtatacatctcataaccacaaattcgcgccatgcaagccttaaggaaagccttctgatttatacttgcttcgcttcgcttcgcaataatcgtctgaatttctgtctcggcccccttgcacaatttatagttagttatggggccaggattacataaactaattacgaaacacatgagattaattgatcctccggtatgccggtccatatgctccgacatatgacgatcccaggttttcccactgcactagttatattgcaaccactcgcatccctgggcctttcatgaacaattgtctatccaagaagcactcgaccagagcttcctctccaccatcacaattacaggatttaatagcagccctgatgccaccatgtgtagctatcacatgacccggctgcccctcatagctagaaatacagcacattctctttccctcagctactaactacgtaagtataacacctggagtgctttgtgagtgcccactaagcgttaattagcgggacctcgggatccctatgtgatagctctacgaaaatttacttactccgtagagcctgactctgagcttataaaagggcagctaaggtaatagggaagcgccactagggaaataagtgaggtaatagatctactctataactaactgactataacgacacatacatactcaacttttactcaatatagcacagatatgatcccctgaagccaactgagttcaatcgaacggtctaggtcgtgctagtggtactccggagttctgttagcgcattggcaagttctcgtccaatccgaaggccttggaactaaaaaaggcccattttaggcttttctgcaacttccagggttaacggcgacttgcgcttctcaacttcaacttcaccaactcatcttcaagatcgtccagggacttttccctcagtcactccttctgaagaaccgattatcgtcattcattcccgaaacataatgttggattaaacacttctttgtttcccaactgtcattaacatacaaagactgtcctttctcctaataattcatacttgactatttatgtcctcgcctcgatttcaagtcgacgacaatacgtcaaaatgtccggtctttaccatatctacaacctcctaatcctaattactattctctgtctatcacccacatgggcccaatcagtggagcccaccgacctgaccgtgccacgatccgcctggcacgcaagtggagagatcacagaccgtcgatcactacaagaacccgcagaggaaaccacaacagtgcgccgacgaacaatcataacagcatcaaattccacttcgacaggaatgcccaagccgttcgacacactctcctacaacttcgccaacgcaaccacctgcatcgacttcttcgcgaaatggcgtgccaacacgacaatctccaattgcaacgccatctccctcctcatcgagaactcaaatgccttcttccacacccttaattcagcctccgccacctcccgcatcctggaaacctcctgctcggcaaatgtctccaagtgcgcatccatcatgaccgctctcgcggccgatctactcaaacccgccaactgcggtgacgactatgataacgataactccgtcgtcaagggcacgtatcgcgacctcgtcgcatacgaaccaatataccgcaccacctgtcttacaaacccatcgacccagaactactgcttcgtcgacgcagtgtcgaattcaaaaaacccagatgactacaacgtgtaccttatgccgctgggtacccctctcactgtcggggatgtgccaacttgtaataagtgcttgaaaacaactatggatgtcttttcgaaatgggcgagacgggacggccagtctcttgattcgacctatctcccctcggcgaagattatcaatgcacactgtggtgatggctttgcattaactaatatcactgtgggctcggtggatgtcagggctggggcggctcttactgctcccttgcccaatcttggaattgccactctcgtggctttagttcttggtgtcatggcaggcctgttttgatctaaaatatttatgccggtttttcttgtccatatctacacttttttttcttgtttatcttttggggtccgtctgcccgggtgggtatggccatggttgatgtcagcgagcgtgctttttgctttctgatttgaccgtctgatttgtacgtaatttctagtgatattgtccatattgctctcactctgttattttcttattctttccgtatacgatagggttgaatcgatttaacatttgcagttcgctaatgccaaaaatgtccgggtgaataatatattcctcaaacgccagtggcaagcatgtccacaaccacgtataaatagacacaatataaacaaaaaaaaaatcgcatctgacatcattggttcgagtgcacatagttcgtgatgtaagaaaaatctggcaaaggtagccaacaaaacaacaaagcaaaaacgctcactgacataagaatgttattttaaaaaaccaacacgaacctcatcagcttctcctcttcaaccctcctcccatagcaacaccaacaaggctctgcggctcacctccaaagctagcccctagactcataggaaccggcgatccgccaccagaaataggactctgtgtagcggcatctcgttcccgcttgacacgtataaagcccagtttggcgaagcggccaacatgcgtccaaaagtgacgcccggctgggtgtgcggcgatgcgctcgagaagatcggctgtcgcttcgcggacaacctggtccggatggaacagacccatgctgacatagaagagaccggcctggttttccggtgcgatggttaggagctggcagataccagcgtagtccttgacggattgggagagggcgaggtagatggaggcggcttcagagtgggagagttttagagtgcgaagacggtcgtggtggtgatggatgtctgggcgttggattgggcgcgcggggaagtacattgctgcgatatcttggatgtaggagtagtaggagcgagtgttgcgccagccttcgattcgggagacggaggctgagagctcgcgctgcttggcggcttcgtctctccatacatacccgtgcccgcggagagttgttgggtctgaggcgtcggtttgatggcctgtcgggctgtccggagagagttcttcgcctgggccgatgatgtagagatttgaggcgccgtagactgcttcttcgaaggctgcggcgacgcggacgaattttgttatgtaggctcgccattttgcgcggacggcattctcgccgtggcgttggctgatgctgcggaggatatcttctatgaataatgtgtcgcccgttgggtcttgggttgtgtgggatgaactgctaggtagaagggaattctgctgctggaagaatagaagcccttccgttaccggtgcaggttcaacgtgactcgagatcttgatgcgacccgtggggaggtcgcacataacgtcccaccattcaggatggttggcaaaagtagggtttgtgacacctgcaataaaaccaggtaccttgaggagatcgtcgatcttggaaagatcagtataagggaatgcgtgtcgagtatacccacgtagaatgccaccggacgcaagagcgcaggccgccagaaccgcctctgcaacttctcccgatggccggttatgtcctagaaatacgacacgcttctgagtgagaatggcgttgacaagaacaatcacggggtgtgtgaatggcccgctcgttgtcaaatggggatgcgctgggaaagcctgcggggaattggcatgcggcacagcgaacgtttgaatgagcttgatgagggaaaagtctccaacagtctccggccaaatcactgtcggaattttgactgggatgggtatgtcattgtagactactttcgactcgtactcatgtgtatcccgcggtaggacatatcggctcactttcttcggtgacggtggacattccccatcccggagttcttcttcttctcgctggcggatcatttgttcgaatttctccaggaacatatcctttgagttgctagattgcaagatatgacgctcaagaatcgacattttcggcattaacgaaaggtccatggcattaacagcgtcatagagggatgccagagtctcggggaacggagatttgaagtagtcctccagcgctaggagtagtaaaggctgtataatggttagggtcaggcgggtgctagtgccaggagtagcttactttgtaaatgtggaggaacgaatgtcgcgtacagattgccattgccttgactacggcgcctctgttcgctattaatactcgtacattgagacaagacagtacgagtaggtacaacttaccttcggacggtattatcctgctttgtattgacaagattcagcacatacatcaagggtggcccttcaccaccctcatcatcgctgctgtcggggtcatcggagatctcgtccaggttctcgtcctgaatatcggctccctcgtggcttccatgatattgtgatttccgttttttcttcttctttgcacccgacgaatccgtttcttcgtcgccattactgtctttgtgtaagaagaacatggtccagtcttgactccgcacatgcgtctgatccggcagcatcagctctgcaagcatgctttcatccccactgattgcagcgggatactgatgctccatgatcggcccccgatcaatatggaaggatgcaactaggatgtattccacatggcgctccggcgagtcgagtgggtactgcgctttgcagcggcgtggcctgaagcttgaggccgcattccctgtggatgttctccgaaaagaaccgtgcgagctgctgggcgagcgtccgataaaggagaccgcaggcgagagccgaggaacaccacttgtttggcggttattcgaggcggagagggagtcgttcgacggtcgatatggtattgttgttgccatcttctgggggtgttgtggatagaggattactccgggctaagctataaatcgaatagcatacctgggggcacagaaagcaccagatcaacggccaatgataataatagttgaattaattgtctcgaattagctgttcaggggttaagaggggttaagaaaaaggacggtctctccacagtggagagacgataagagcgataagggggggatccataacattcaaaggttgaacatcgaggaagatgatctatcagaatgcaatctgtcttttctttttggaccgtacattgtagatctttctatttatattacagcaaaattgaggcatcatatattgcatttttatggagtatgaagtaaaaaatctgcgaacaaaacaaaacactgtccacttctaggcattttacctgatatagaatagaaaggcaacattgtgctacagaacacttggatgtaccttataggtatacccaaagaacagttaattatatgaattaccttccatttatcttactttctatatttagacccttggaagccaattgatggttgatgtaacgagtacgattccttatagatctaactataaacacttcaaagttacataactatacaacacctagtcagccagatcctgtttctttcttttttccttcaaaatatagaacttatattatactctccttagcaaggtgaaattacaagcattaaagccagacaaggatcgtacaatatacaatagagggtcaaaagtgtgttcatatagatagggcggtgagaaagacggtggcaaaattatgttgttgtgccgggactttgtttacatcgataagcaagccttcgtcataggctgtttacaattcatatttcagctcacacgcgaattttaccatggtaactaaggatcctgagggatgatataactattaaaaactaatcaacaatgacccaggccaacaatcccacattcaaaccatcgccgttatcctttgggtcgccgagggcatccccgttccggcgcccatccactccaaattccccgccttcggccagtcgcacaggaggcaccccggggagctctcccagtcgggcatatacacctatggtatctcctagcaagctcaatcaatcatatacagtggaggatggtgaatcgcgttctccgaagaacgagcggcccattccccagccgaattttgccagagagttctctccttccccaacgaaaggaggaaagtcgccaggcagcttatccccaatccatgggtcaaggacgggtggagttgcaagcccagctggcgacgcggctgggaagctgccagcgcaacaagtgagggagatcagagaagctttccaggttctcgatagggataacgacgggcttgtggacaaagatgatgtgattgatgtgctgacaactttgggtaggagaaaatctacctatattttttggaaattcggacgagggactaatccgagtatctgaacaggccaagactcgtcatcctctacgctctcgcgcttctttccaccaggagcaggcaatactatgaattttccaaccttcttgaataccctttctgggctcatggcatcgatgtcaccttcacaagagcttctcaacgctcttgctgcgtttgatgatgatgacagcgggcaaatcgatgccacggaattacgtgatgctctcctacatacctccccagaagatggagaggaaagattgactgagagacagatcgatgaagtcttcagtgggtttatagggcgcccagcatttattggtcggggagcgaagtcaggcgggatgggtaagaggggtgaggttttccagtatcacgacttcgtgcgcagcatcatgggtggggataatggaaatagtgccaagaatgaaggagatgcacatgtatgaactgctattatgaaatatgggtttcaattgagttggcgttacggggtcgcgtcttataatgttggcagtttgcagattccaagtctgtagaagcaggggtcagactatacaaagcttgtcaagaatgattatgtaccattacttgttcaattaccaatgattttcggtaactaaaagcagtgaattaagtaaatagaagtatacgaagccaacgccttccgcatcggcagaaaaacatccagccaccgcgatcagatacactccacctcgtcaactgcactcatcttaccccgtttcctaggatgtccgctcgtgaacatcaaatgcagacttgaattcagaaaaatggccaaacctcagcccccctgggctcttggcatcccgggccccgacgcacccccatcgccgcgaaccatgcgaaccctccgaaagatccaatctcaccaagtgctgtcaacatctagcgcgctcattgcccagacccaggcgtctcaacaaactggctcccatgaatctcaacctggatcaacagcaactcctggtgctgcgacccgagcgcgcgcacatcgccgagctcgatcaaatagcgacgcggcttctcgtgaagctgcggcaacaccacctgcgactcagagacgacccccgcggaaaacagggtcgggaattggaataaagcgatcgcttctagagagctttttgcgcgatggaccgcagagttcaaatcccaacgagggactgagagagctcaaatacctcgtcctatccagcagagtggatgctgacggagatggcatggtgaggggtacagtctgctttgcaaaattaatgtctaacacttcgcaataatagtcgccgtaccggatctacctctggttggtcctcctcgacattcctcctatgcccaccgatgaataccttgatcttatccaccgcgggcgttctcccgcttacgccaaaattcgcaatgatactttccgcacactagccacagaccctctcttcaaacgccgagtgacggaggcaagcttgattcgactcctcaacgccgtggcatggaaactccacgattccaggccgaaacctcggtctcgaccgacgtcatctcggcgccgtgagatggagcttctagtgaatgcaccccctagtattgcagaagagtctccctttgggggagagttggagaagatcactaatagtactacaagtgattcagccatgtacgtccaaggcatgaatgtcttgtgtgcgccgttcctctatgctgcccgtagcgaggtggaagcattcgctctgttccattacttcgtcacacgtgaatgtccaggctatgtccgtagcgctatggatggagtccacaagggccttcgtttggtcgaccgatgtcttgagattgtggagccgaagcttgcagcatatctgttctccaaggggatgcacgccgaactgtacgcattcccatcagtattgaccctctgcgcttgcacgcctccattgccagaggtgttacatctttgggatttcttattcgcatatggggcacacctgaacattctgtgcattgtcgcccagctaatccgtatgcgagacctaattttggagagtccgaggtaagtcgaaggctgtcctttgaatgtatctgaccatagctgacttgaggatagcccaaacaaaatcctccgctcattccctcccctcaatgcaaaggagatcattgcgttgacggttctccttgtccgtaagatcccagaaaacctttatgcagagatgattagccatgcaaaatagacatggctagacctaattgagagagcccgaggtaaattccagcctgatgaggagctctgaccgaaagaaagattttactacctggggtttgttttcggatcggcgtttttgatatgattgaccgcaacgattgcgtctggtgactggatgggatgagacttacattaacgaacaccaaagataacacgcttgcttgaatgaactaatgattgtaccagtatttgctagtttttgagaatccatttgagatgagacatgattctcccttttagaattcagatgttttactcttatggaccatgcttccctgttcgtttgtcaaaggatgaaaccctacttttcctcagttctcttgagacataacaaacattgtttgccacaagacaagaagagatgattgcgaaagcagcaagacatcttcattaacgcaatctgcatgatttaggcgcctttcatcgtctgcgctataagtactaagtaccctttacttgacccctctttcttcgccccatcattacccagagaaatcaatgtcgtccgttctaataacatctatcgtcctggccgtatgccttgtcctgattctgatatggagcaacaggcgcgaaaccaatttcgcatcgaatgacccagcgatatgccgcagaatcattgccggcgtgttgaaacacaaagaccaaccgaataacctatcaccacaccaagcgaaagcaatttccaacaaacatctcccagtcgccttcggaatcgacaacgccttcacccgaacagagcgtgcgcatgccgacatgttcgtcgagaaagtgaaacggctgatcaatatatcgacggagcagtggtacggcgtatccgagttcgctagagtcactaccagccactggatcgagcatggcttccccgggatgaatcatagctgcggcaacagcggtcacaaaggaaagaatgatgtgaagttcaccaccggccgtaatcggatcaacgtcgccagtctagcacaaatactttcattgaaagttgtgctatggctgatgttcgacaaaaagactcaagacgaaacaggccacgagaatctactgaacctagcggagtccatcaatcgagtttggatatcttccaagctgaaagccacggagaacgatattcccagatacgaagacgacgtgttgcttcaaacgtcgctggtcaatatcttcgggcaacacgatcgcccagaagacaacccattgaatctcatcctgccttcatttgagacgatgtggcgcatcgtcttgcgaggattcctagagaccagattcgcgtctggaaaagaagaacctttgtggcgggagacaatgattgcatttgccatgaatcccacaaaatcccaattcgacgggcccccgtccactcgtcccaagtctgaatctagggttaatcccagcataggcgatacacatgctattcaaagttcaccctgcgcaaaacacatagttcgggaatcgcttcggctgtatgtgcccacgagacacatacatcgagcatatcagtggcaaccgggtatggggacttctcatgaaatcaggtccgctgatatcgaggggtgtcatctgaggtccgatatctggggttctgatgcagagcgatttaacccagatcggtggtcgtttctgacgccggcgcagggagacgcttttatgccttttggatctgcgccctttgaatgtcctgccaagccgactttcgggccaaggatggtcggggtcttggttggttctttgttggcggctttggaggataaggagcatccgaggacttggattttggattgtgaagatgggaaggtgttggagcacgtcacttctgggaagaggttgtgtccgcataggaattcctatacggatttatatctagtgcggtctacggaatagagaatagtgaacagtgaacagagatatctatggaatatctttcgaacacatatccttatgtataagtaaagcaagcggatgtatgggaggtcggagctgggatttatagtcaaaaaaatgtaaacgcctaggaatcacagaataatttacgtcaccaagaaagaccactaccaacagccaataaagcacagcacgaacgaaacttatgtatgttgatatcgaccacacccgcctcgaatattacatagctctatcacgtaggcgcagatattggtgaaatctcaaccgactttttcaacccagacccatctatcaccagaggcttagaaacaccaacagcattggcttctgcggtcatctcatcagcccatgactgacacatatccctattgccaggtaccgaggctgtggtgtctgagccagcaacacctaacattccgtcgacttttacggcccgcgtgagacgagagccacgatcaagcttcaccctgatccgtgacccaaagaaactcaaattgttgaacatggtcacagcgcactgggcttcgtctgctgttcgcatggtaaccaagccgcggagccggccattgaagtcggccgagtccatggtgattattctgcatttctggacagcaccggctgcttgaagaaggattttcagatcggtgcaagtagtagccggattcaagttctcgattatgatggctcgtcggtctgaatagatgaatggagagccaaggtttgtgcctttggcgcgtgattcgcgatggtggtagttctggtggttctgtgattgattgtcgctctggtggtgcatgtgttgtggaggcgacatctgataacctggcatcatgttccaatatggctcgtacattgggccgttcattactggggatggggggaaacactgcatcggtggtgcgtgtgaatctggcatcatagtcatgaatccttggggtggcattggtatgggtaccatcatgacgccatactctgagtatgagtatggtggagtggcggggtgcgaggatctggggaggaagattagctttcatattttatacttgaggatatagactcactctggcgagacgggtgaagggggcattgccatgtttccatgtactgatggaggtgtggagtggccagagatatagcccgtggacatcattgctggacttctggtaggcccggcaatgggcttggtgggcgtactggtccgcgaaagtgtgacgaccaggctctgaccctcccatccgctggtcgaaagtcgatctgtgttgttgttagggcggatcattggggattgcgggatagacacgtacggtacgttcgccaggcctcgtcttcattcttgacgatgatctggccgagtccggtggggaatccatggctatcatcgtatactactgcctggcgaatatgcaatgcagtttggcggacgagatctttgagttcttgccagcggcaatgaggtggaatctggaattcttgtcagtacttgaacgcatttgacatagatatcaaactcacgccttgaaggaatacgacaaactcatcatccgacctgcgcgatctgggatggtatttatcacgaccgagaagaggcatggctgcagatactccgagacaacacaccccggtatttcagtgccgaaagcgtactagctcagacgtacggattgaaatggcggatagaattcggtccgtcggtgttgcgaaatagtcgaggctcgacttgtccgaccaggtgtttggttgagtatagaacttggacaattgggctttctgtcagagggctatgttagcttagggtatataaatatgatacccgggacgactacaggaacgacatcacaaagcatcaaggtgtaaccagggtgcaatacctgggaacaaatggcacacacctgccttttttttttctcttcctgtcggataaatgcaagtcaacgtattggtctgaccgacaactgcagggaaaagagataaacccctccacgagctggacgaaggtcgagcagattataaagccctggaacaaaaaggaagagaagtcgatgtttcacaagaacagttaggatgatatatgatagattcaattaaattcttactagtattaatctacgatagtctcatgagcttacaagtagaaatcacgggggacccagaatactgcacaatctggacgaatggcgacaccagtcgatcagcagtagccagtcatatcagagaacaagcagttccctttctctttccaactgagatctgtcattttcaccatgagttcagctctgccaaatattagaatacaatagagtggctctgccgtcccacctcccgggtatagtcccacttagtcaaggcctatcaggggccctaacatgtaatatgccccctctttctttgctatccatatttaaataatcatctcgatcacgtaccggggtatatccacagaggcaaatcactccgtaagctgtgcttacttgacttagggaggatgtagtgttacaccgctagatccggatcggacatgcggagtggccatgctagtggacatgcatagtggacctgtattcatcacattggcttctgtgtctaatgtcagatcggaaaccctggaaaaaaagcaaaaacagcaaaggatgggcaggaatgaaagaaaaaagaaatggttttatgaaagggagatcagtcatatcttgcagatattggtttttctttttttggatcaattacattgactattgatttataggcgtagctcgctaagtacctgcagataaaatatagatggaattattgaaggataactccggctcaaattattgccctaaattctcatgtggacagacaccgccgcaagtcgtcgtcgggtattgaatatgtactcgtccttaggatatggagaaccaagtgtcttacagatcttcagatagatctctgtgttccctttgaccaaggccgataactacaatagacatgccgcaggacatgtgcgactgttaaaagtatatcaagacaaatgaccatccgcacagctacggacatcctaagtatttgtactatgacgatacgccaccaaggcactgggctccaggggagatcacatggccatggtctctacacatatctacggcctcttttattgatggattgtggcagagaatcttctttggattatgttcagttcttatgttaattaaattatccttccacgggcgggtgattccctgctaaatgcagatgattacactctattacggacatgattagcctgcaaatggtactatttatataacaagcctatgtataggcaagggatcgtgtttagttatgtttcaattcaaatagaaggataaagtaaattaatctaattcgatgttggaaaatgtgatatcagacagtgtcgctcgaaacagataatgagatagggacccagtgggcgatcgctgaagggcaaaataaaccaagacatgagaccggctccatgccgtacaataacctgctgcaatatgcataaaaagggaaaatgtaaacagcattgccgtttataaaagttggtgaacctgcaagagaacgcatgcctgacaaatcaaagcacaagaatccacatgcaaatagtatgttgtggtcaatgccgaccgagtggaatgaaccaaattcgatgatatcccaagcgcacctcggtccaaagccccgtggttcttgcgccgataatccctgatccacaggctgccatttccggtgtccaacctgtacaatcctccataggcctcataattcgtaaatcgtgatcaacgaagatcaggtagtgccagcacagcccgggcgaggtcggaaacgaaggaaagcatcgaagaaacgggatagaacgttatttcattcggaaaggaagtcgcatctgtcctcgcgacgggggagggattttggtttgcaagtcggcttttgatgttgatccaatcatcgcttgactccccggatcgtccggtttatttggtcctcgtttgggtttattgtgggtgtgtatatcgtgctcatctcatcctccgaagccgaccttggctgcgcagcggctgcagtagtaagagttcatgccgaactgaacaacgctgcggcctgattggcctaggctgagagattgttggcagcgagaacatcggacaatgtcgagagtctggggagaagtggcctccgatgggcgagcaacgccggcggtctgaggttgaggagtaatttgcactggagagctcattttgaggagattttgaactcgagtgaggatttgaaagagagaagggcgctggaaattgttttgcgttgacgcagttaagaggttgagccccgtgatttcttggtttacttcggttttctttaagtgatgatgatttgacttggtaaacaggaaaggtgtagaaatatgaaacagggaaagatcacaggcttttaaattgttttcaagccacgaaagactccgtattcccccttctcttgccgatcatacatgtgggctgacatatgggctgcttttaggctcttgttccaataactcggcgctgacgaggccattattccgataactctgttacctacgcccatcggccatggcgataacacacatctccggcataatacgatccttgatcactggcctattggaaaactaaaaagttgaaacaacgtcgtgggaggcactatatttgatacaaaattgatcatctccactttcatccaaaacagaactaaatcagaaggaatatttttagagtcatgtacatttacgtaggtgggcgtctcaatatctcgacttgcaatataaatacaatctaccgacttggacgtatttctattatttcttttaagttctgaagatcctgaggtcattgtcattgtcattggggctaatacccttggaatactgcagctaagccagtttaggccatgaagccagagagaaagtcgaataaggtgtggcaaaccgaagggaaacggatctccaaatgaattcattggacgattcattggccaattcgttgggaaccttggaattggaacatcccactttggccgaagtccatggatttccacgaatagcacccgtggcgcatcagattcgcgagcgacgtcatattacctggattcggcaacctctcctcttctctccacctaacgtgctacgttgcagattgtcgagtcttcaattccccccccatcttcgagcctaggccaacgccaaaaaccgtttagattcggcccttgccccgcaaaaaaccgaaatatttcctgcccctcattcttgtcccacccacgtatcaccatggccaccggacaccccaaccttcacagctttcccaacagcgatgagctagctgcgcaattgcgaggctatgtcctccgctgccagaactccgctttttcccgacatggcactttccgcctcgccgtctccggtggctccctgcctgccattctagctaaagctctcctcgccccgagcaatggctccccggaagatactccccaattctccaaatggcatatcttcttcgccgacgagcgcgctgtaccgctcgatgatgaggaaagcaactatcgcctgctgaaagacgagctcgtctccaagatccccgccaagttcggctcacctgtcgtccacgccatcgacgaaaagcacattggggatgacgatccccaggaactcgcagatctctaccaagaagacctgatgcgcgagtttgcctccaaggaaactgtcaaattgcccgccttcgatctcatccttctgggctgcggtcccgatggccacacctgctcgctcttccctggccacgccttgctccgcgagaaggatgcttgggttgctgctgagacagactcccccaagcccccgcctaagcgcatcaccctcactctgcctgttgttacccacgctctcaatattgcctttgtcgcgacgggtgcgggcaagaagggaatcctgaagaagatctttgatcttgaggagggctctagtctgccttccactctggtcaaccagggcgctggtgaaaaggtgacctggttcacggatcacccggcagtggatggtgtttcattccctcgtcgtgggagtctttaaggtgtgagatgtcctagatggatttgagaggtatggatatggtggtggcttctttcctatttcgtaactctggatatgccttgcatggcattgaatccgctggctgtgatgaaaagtgattgctaggattaatagaccaaactcatatcttaatctgtcatttttgtccatacattataccgcacagtagcgatttcttctagaagtatgtccaacatcggaaggtcctattgtttgtctgcttatcctttcaggtctttctagctggaatactgcaaacaaacggcctcaataagtccggagacaacaaatataaccaactgacagttttgtaagacattgttggcattttagggcgagggagatattagaaccggtagcggagttcaacccactttcaaggagcagatagctaagtccatgatctttctcccctttggttcgatgaccagatgtaacagagatattatctcgtaacaagatagaaggttacatttatttttgaattgctcacaattcgcaatgagagatatatcacgccggtgctattcctaaacctgacactgctatttagaaggcaactatacaggaaactagatatatggtcattttaccaaatactcgtacgctattcagccaaagagtggtgtcgagaattcttgattagaagatcctttattgattgatgtaagatatttgcagatcaatcaaatgtggtcatatggagctgaaccccttgcattatgctgattctccaaccgcaagcatacccgaaaattcgttgagatttgccaaattcaggctctgtacagcgtatcacctcaaatgaaacgggttgcctaagaaggcctatctagaaaggggccaaaaatgttcttgttgtccatgctatttgctagcatattgccttacctttgaataagcccctaaagcagatacgagacaattcattgagagatacatacccaatctagtaacgtatcttaatgtcttattctgccatagatacggaggacaatgtactttgacagtgagtgcccaagccacgcagcccgtgccgatctcccgtttctagccggccccccacaaatgcatgtaaccccggatttccttacgggatatagagtacagcttagtctatggcctctttaacggtttgggcagttattagcctaaactagttggtatgataaatgcgttttggatatggagcatctagaccataggtgtgacgcctatcacttgaccgctaggtacaacaaacagctaaatgccggtcaagtaacccacaaacatgaaacgacccaactaataatagtcccctactctcatatatgcccacagagaaagctcaattggtcaatacgtaatcggccgagactcgtggacccctggggctgtcttggctgtcgatgctgcattgccctcttttctctgtgacattgtgctggccggccctagctgtttttgcatttctccaaacaaccctggtcactctgttacaattaagaggtattagcgagaaatcaaagttatacgagggagaagaactcactccaccatcaatcttgcagagtgtgaagcagttgttggaccgggaagaaagtgccactcctttgccggcttcgataggtgaggcaagggctagaccaaggacagtcgcaaaggcccaaataaagaaacgcatattgaaggtgttggcgggataggttgttggatttgtggtgggaacttttgaggatttgataaagtgatcattgtttctcaaggtacactggagcctcccttttatattatcctttctattgtatactacgtgatattagatactcaattcatcccccttgactgctgtggggttccgctcccacgactcgtgcgggcttatgtgcatgatctccaacatgcagggaggatcctcgaatgctcactcatattccaaaatgccaagatcgatctacatggagattgtgctgtttgagtaaagacctacaacttccttttcagctcgatggctatacggtgtcggctgatccaattcctgcaatgtaacctcaaattgcgaaccagcaaggcatggttctggtacattaggcgtccaactataaagatctgcagcctatcgcagctattaggaaaatagtcaagataacatcggtcccatataaagcccgatgcccacgcgagttatgaaactaattcgtcagaagtgcacccatattcactacaaacctcacaaagaacctcaaaaaatctttacaaatcaatccctcaaacatgaagctgtttattgtactttttgcacttgctgcctacgcaatggccgaggccggtccgaacctggaggcgagagctgggtgctcccagaagggacaatattgcaacgacggcacattcctgtgctgcccgggacaagggagctgtagtggaggtgtagtaagtttgcagcagctctctctctagagacagatatggtcaaacatgatatcagatggctaaaatgagtcatagtgcaaatgagcaacgatatacctaccaagggagcgcagaggtagctttatggttacgggatccatatatcgagattgttaggactgtctctttggtcaaagttcggggtactccaggcagtgtgttcctatgttgccgattctaaacggccgtggataaagctttccatccgcaataaaagccaataatccaatgaggatttattgcaccttgctccaagtccctgcttcataaagtcagcccgagttcgcaacttaattagtaagatggctcatacccctctagctcgatattagtggagcgtagatccccgtggacaataaatagtcagccggcctctgtccttgacattatagccttcgattgcaaatgttttcccagccgttaatacgtacaacccattgtttagcactcatgataatatctcacacatgctcacgcatagcaacccattcgctaacatcatgagcagctatgcccttaacctaccttatattagctataacatctgttcgctcgagggccatcatgtcagatgttgctccacagacttcatttgacactatatcttgtgttaaggtagagaagaacactatcattgccggaacccaggactggtatcatttgtgtgtgagatctcaccaagaacaacaacaaccatgcctcattgatccttaacggacacacaggtgcggtgttgtgcctcaagttgcacggcaactaccttgtctctggtggtcatgatggggtggctcgtgtctggaagatcgaaaccggccaatgcaaggatgtactccgaagccacgagagaatgcgcatgcaattgtcactgctagcacacataggacccacagcgcaaaatcagagatcagggggtggctgcgaaacattgaagaatttgcaggtattttaggaactacgatagtcaatgcaagttcaagtacattgactccgaattgctggaccacctccatatggtgcgagatgacttggtggatatgttgcgaagtggaatgggttgtgctcgacggcaaagacggcaatggcgtcattgctctggctaccatgcctacctgaccatctcgcacatgcaatctcgcattcgacagtaattgatatttctcccatctcacataactgccgttaggtgccctctatttcaatatataacgatgtgattaggaagtgacgggaaagtgactgctagctgaacgtcgacaaaggtagcctaaaagaggtatactcgtcgggcatagagatgtgggttttattcttttcaacatatccaaacaaaatccgagatcactgtattttctttttttttttttcaaacacttccccatgtgttgtgactgccggaggatatgttataatctcatctggtgacaagctgatatgcactggtggagtgtaggttaagaataaaagagtgggttaccatagggaagatcgcacacatcacctccccaactctccgttcacaacaaaacactcatttcatgaacccaatgcattatgccgattctcatttaatgacctaatacgaccatgcctatcccaacacgttcattttcgctgcgtgatccccgtaaacaagtcagtcccccggttgtttatcccttgaagctccccacaactgtcgcatccctcactgtgccactattgccatgccaacaactacagaaagaaaccatgctaattactaaagacttcaagtatagcacgacctgccacaaaaacccccactccactacccggcaccgctagcccgagcaaggactctgctcgagagacgaatagcaagaaccgctcgccatcaaatccctcgccggtcgagggtgttgctttgaaagacaatggacccactgctcgaggaaaaaccctacttcctcagcgcagtaatcttgccctagacaatggtcgtggcacgggacatgggcgcattcagccacctagcatcaagccgaaaccacgcgggcacccgtcaccaattagacagccagagatatcgccagctaggaaacaaacacaggcagattccacagcaataaagattggggtagcgcccagccgtcgtcaaagcatcatgcgacctggtgccttgaaggtgcctttagcgaagatcacggtcgcttcgtcaaagagctcggcacaatcattcgcgccgccctcaccccgcaaagctccaggaaggccattaccagttcagcctcatacgatcagaagcccctcttcacccaagaaaacagagacgctacctccaccacgtcccacacggtccctctctttacggcaacctgtcagcgctagcaagggaccacccacagctgccaaaacacatgtccggcacaagagtcagctggcacagaatacaaaacaagccgaaacaaccccggtaatcggccaacgtgcacgagcacactcaacataccaacggccgtcgtccccaaaaaaatcgtccaaacctccaacgcctacccctggagccgaacctcagtctggaaatgtacttatcccttcgtcgtggccggatatcgcagcactacaaacagaacttcttcagctcagtcttttccattccaactcactacaaagccaagctgaatggaagtctgattccgagtcacgtctgcgcaaaaagtatgacagtgtcgctagccaatatcgattggtactagcaaatgaaacgcaacagcagtgtcacctgaatgcacaggccctacggctttggctttccaattgtcgcgaacatcgcggtccgcatgatttctccgagcaaatccaaattctatcacgggttctacaggatgtctcggacatgattgctggcagtcgaggtgcacagtactctcgggctgtaaaaaccttcgaagactggctcaaccaagcggagcttattcgtcataaacgtgggtcggggtgccttgatgtcggcgcctttattgatcccctggggcggagctggaaagaatcattgcatgctttaaatgtgaagttggaactctgcgtacgccaattacaagtacttgatatcccgggcttgggggaattggagcgtctagaacagtctgctcttgccagagtggccaggaatctggttgaattgatacagctgatgatgcaggagattcgtgccatgcaaacattggagacagaagtggtgcgttcagaaagagattatgtcggccttcttgcgacgcagctggtatgctctatgaaggaaacgagggctccccaagtcggcgcatggaggagctagtctgtggtttatgcatctttgcataaacatgtagttttttaccacctgtacaaacgtgcgcatattacgtcgaaatgaaaaggaatgacattacacgaagagtgacagtatttcgcccaaagtaccttgcgcccaatcatatgtagcttgcacacggtatctaggtaactagtacataatggagatgggaccctgcaacggggacagcaccgggacctacagccctacctgcgaaacaggcgtgagagagaagtcgtcaatagtggtattagtgtactagggaggagaacaccatggggtgactactaagaagagaaggtggttgatgtctgcgttgctatctctgcctcggggggcttttttagttatcacgtggcagcttagtcactctatactggagcccaacaaggtaaaccgatgagtcagccaccgtcatctccaccagggctctagatcttagagttatcgctcgtattcccctcatacttttatttctatctttctcactccatcgtcacttgtctctttctacaccgtacagatatctactggaatgatatgcttcatgcagggtgatgtaaccttgggaaagttatctctcagctctcttcttgacgtcatccacggcagcttccgttttgacagataaaagtcacccgcaaagagacggtatccacttgcttagtacctttcgagatgatcgccgatcgtacctagtgaagaacttcaactttctcccccatctaatccagtgatcatgaaagactcgctttacgatcgcctttggcgccgggaatgcggggaacagctgcggtatgctgggcttcggggaatttacggatctaaggaatggatcaatgatctcgacattgtgaacgaactcggtgggcatactggttgtgtcaatgccctcaggtatgtttatagcttctgcctaggcctaggtactcggtttcatcgactggccaacacctccgccatttctgatgcttgccatgctaacagtctcgcagttggtcaaagtcagggcgtcttttggcgtcgggctctgatgatagacacctcaatatctactcctaccaacccgactcgtccgatgccccattcgcgctcaacaccaccgttgccaccggtcataaagcaaatatcttctctgtcaagtttatgccacactcaaatgatgggactctggttacatgtgccggcgactcgcaggttcgcgtcttcgatatcgaatattcaagtgggagtagaaatgatgctaccacctccgcatttgcggcctccactcagagccgaagcttcgatgagttcttcagtggcacgcggtacctgagtgacggcaataccaacgccagattgtatcgaagccacgccgatagcgttaagcgcatcgttaccgaatcctccccattcctcttcctcacttgctctgaggatggtgacgtccgccagtgggatctgaggctaccatctagtgcataccctccgccacgcggtggccaaggcttcatggcataccgacaagggttggaacatgatggctcgaatgttccaccgcctctcatatcttacagaccatacggtttggacctcaataccatctcctgctcgccaagtcagccgcattatattgccttgggtggtgcgcacctctactgctttttgcatgacagacgaatgcttggccagaagacctctgctagtgctgccagcctcaataatgacgaagagatgagcaaggcgacgcgatgcgtgcgaagattcgcaccgggtggcaagcacaatttgaaatttgatgatggacatatcactgcttgtaaaatcagtgatgcgaaccccaatgagatggttgttagctggtctggggatcacatttacagttttgatttaatccgcagcccagatgcccgagaggtacaggcgggcgataaatcgactctcaagggcaaggatcgacaggctcgccgcagttcacggagccggaagcgcaagaagcccacaacaccttcatcgcaagaaagtgatggccgacatcagtcccaccgtcggtcagcagagccagataattttaggatccaatatgagaatggcgaatcagaggatgtcccatttcccacattatcagatagtgtcatagacaccgaccccgagaatttgctcgagcaggctcggtattctgtgctgaatgatgcccagcgattgagcatgcagattgcaaaggggttagtagaacttcgaaaggctctgttctcagaaacgacagtccgggacgcggcagggtccgacgaggtgggacccgaatcgtactcgagatatttttcatccgcactggaaattgcgtctacgtttcttccacaaatgggcaatgtcatgcgcgactggcgctatcccgtgaacccatcacaggagacagttaatttccagcaatcgcttcgtcgcaatcgccaatcgtcatggagatttgtccaggctgctggcacacttgctcatgcattggcagatcaaacgcaagttctggaagaatcaagtttccaaatgatcaggcctgcaccaggcgaagatggccctattgagctggcagctcagtttggctatgaattcctccgggcaattcttctttggctgcagggtggcaggcggcgtcttctagagggctttcaacaccacaatgcccctcgacgattacattgccgatttcctatcccagatgagtcaggagaggatgccatcgaaaccattctagtaccctacattatggaattggcccgtgacactccgattgtgaatgttgacgcctccagattcgagcatgacagtacgcgcattctgttccaaacccaacgggctgccgtgactgcatttgggaatgctattagattgcccttggaagatcttgggggctcggctgctcggttcgacagaagccgtgcttctaatcctgcctcacaaatccgctctctcgaccgggcctctgcgaagaggttctggattttacgagtgggccgaggaatcttgatgggggcaggcagtgaagtaaattacagatttgtcaacaatgctttcggcggacttcacaccacaacgaacgagtctaatgatttgaatgaagaaagggacccagtttataccgatcgcaatgcggaggaagaacgaatccaacacattgaactcatcggggctaggcaaaataaccctcggcctgaaatctctcgaggcggtgcaacttcttcggacaatagcgacgtcaatacagacgagaatgatagcgatgacagccatgcagaagattcaaccgacgatgaagaccatgatggctggcccatgcatttatcttcagatgaagatagtgagggatttgattccgatgacaatatgccccagagatatgccattagaaaggcacgacatgagaatgtcgagcgccatgctccatgtgtgcctcacatgagaagctatcgcggtcactgtaacgtcaagaccgtcaaggatgtcaattatttcggactagatgatgagtacgtggtcagcggctgtgattctggccatatatttatctgggaccgcaagacgtcaaatctagtcaacatcctagaaggcgatagtgaggttgtcaatgttgttcaaggtaatttccttcactagttaaaaagacaaagattaacattgtgatttaggccatccctatgaaccaatgatcgccgcttcaggaatcgatagcactatcaaaatcttttcaccagaccggaacgctcaagatgatgcccgtaatggtgtgaacatcctcgaccctgacaatccatcaaacgcgtttggacaaaacaactctagtatcggcggtctcgtgagccggaagcgagttcatgaaagctaccgtatcatgagccaaaacgatgttgaacgtcgtggtggtatgagtgaggcacacatcactgtaaattacttgccctcgatctctatataaatatttttgctgactattacctgaagcggagcatgctcgagcgcctggctgttaacctgaggggccgacatggcggccttggaattgatgatattgctgcttccggtgaccatcggaccgttgtcatcgacgataattgctcggtatgtcaggatttcttccttatacgtgggaatgatactaatcattcgataggtgatgtgatagatgaacaggcagagctctggatatctgcatttgcacagtgtcaaaaagatcatcagtctcataacctcatacatttattgtcatagcatcgcattacagtctctaatgcaagaaggcactcttttacttctttcattcctttcttcaaggctgcacctgccctttctatatttaggtaccttccttccttataaagccaagcaaggcctagaatacctactatcaccccaacaactacgagagccctatattcaagcaacactacacacatctggaaaagaagtagggcgccttgagctagctcttcttacaacatgttatacccgctgatcttacggcatatggtagcgatatgtgtacccctgtatgtgtaaattgcagacactggcggtattgtcagtcaaatccatactcggaaatgaccgaagtcttttttttggtttcgtcgattattttctatcgagcttattatgaagtgtactcgtgttaatatcaatgtgagtttaaatgatgatcccaagtcacaaatggatcaagtatcagttcaattagaaatttatgcccaggaaatgaggtttccttctgataattggcatgtcttcgttcttcgtctcgtcaatctagaatattagatggtacagtagagacagtggtgcggatatattgactagtggtgatattgctggcaacaatatattgggcgggtgtgtaatataatcagcaaactagatattcctatagatgcagatatggatttctgtagccgatattcgatattcgatataccttcacgtgaccgtccttatcgtagaaattttttgcgataaaaaaggaattgcccgcgcgaatatctagaggggcagatcacaaacttcatttataaaagtcaaaagtcatttgatattgtgtcggtgctttaggctcagctgctgtagtctaggtcccgctatttcccgaccactctacatctcctaacccgatatcacagctaagtatcgattctatactgcggttttggctgtcgaaaaccaaggagtgtgtaaaatttgttacatcttggaacacatcacatcatgtctgcatcagaattgctccaagctcgcaacgagacaaccactaggctctatgcagaccctcacaacccccacctccaccttgaacgaggcattcagtatgaaaagttgggcttccccgacctcgcctctgcagattcatatcgtgcgctagcactgctggagtcggtggttgacccagatgagtgcgagttccatgccaggcggaagatagacccttcccagcaggctcccaaaacggtggcgaatgaatcagatgacgaagacgaagacaacagcactgtgcctatcacccaagaggaatatgatgccatcattgaccaggtctatgtccttctagtacgcagtctcgtccgctgcggctgctaccgcgatgcattcgagttcggcgtgcgcgggttggccctcctcgagaagaggtctgcaacagcctcggtagctgctttgaacgtgcagatggatcgtgtgaaggaaatatacaaatctcgcaatggctctgaaacagaaaacatcgatctagactcaatcgatcccagcgtcctccctgcacagggcttcgcccgccgtgtcctctatccctggaatgggcacgagcctgaccgccgttcaccagagactctcaaaatactcaacgagcgattggcggtcattgcgccgaaatgtgaggtccgcgcagtggccttgccagtgctgcatgcctcggcagatgacgactcgtccggcatggacgtctccgtgcagctcggcctcttcgcgaaagaagatatcgccccagacgaaatcatcctccgcgagtcttcactgctcacagcaaccaaccgtctccacgacgatctctgcgatgcatgcaacgcaccgctcccagaactgtccgcggccgagccccccgtcgcctgcgagggtggctgtgtagatatcatcttctgcagccaggcatgccacgacacagcgcaggaggtttaccacggggcaatctgcggcctcgaggatggcctcgactctatcggcaaggatgtccccgaccctaaggataaggctgattacctgtaccttcttctgcttggcagagccctcgccatgtccgccacacaggacaagcacccgctcgacctgcccgagatgaaatatatttggggcgatttccatgatctcgatattgagtctgtctccgcggaaacagagataacaccaaccactgacgataccgccaccctccccttctccttccagctgaatgtcctgcagccggggcgtttcctcgacgaaatgggcctagatccatacgtcgcgctctaccgctacgatacctgggttctaaacacgctctttgctaagttccgcggcacggcatcaggccgactttcgacttgggatggaggcccggagctgtgcgctgttcatccactgtggtgccttgcgaaccattcctgcgatcctaatgtgacctgggaatggagtagcgaaatcaatttccgcgtgcggagagacgatgagacggctgtttggtcgcgtgggcttgagatgaaagagctaaggcctggcggtattgcgaaggattcggagatcctgaatcattattgcgatattagcttgcccgttcagaagagaagggaatgggcttctggggctttgggtgggacttgtttgtgtgataggtgtgtttgggaggctggggaggtggagtaggtttgtatttatgggttggtgtggattgccttgatagatcacgatgagatacccgtttaactgcattcaacgagaagatttccaatcaatgcctcctatagatcaaacacttattactggagtcatacaaggtgctctatttgaacatgtttatttgaacattgaggaaatgcaaccctcaccatgaagaataacacgtttttagtcttcaataacatacttcaggagcgcagtgacttcgcgctccagttttaaccaaacttcttatatttgtatatgtaggcgaacataaacatagtaaaaaataggaaaaattcattcaatgtatatcagtatgtttagtaaatatctattagtttgtcttcgatctaaaatatggtactgagatttagacttgatcaatctacgatctagaatattccttagacttgcgtgtgcgtgtgaatttcccgggcattaactatcgcctagtctcctttctgttttatacgtattcgtttttttgcacttatctgttctataagatatttattttgtaggtatcataaccgaagagatgtatgttaatggatatgatcattgtgctttgtttttcattcttctttttgtccctgcagctagttgagatggatgctcatataggtatgtatacttctccttcaggaatcccagagccactaagaggactatctagaaagaaaagtaccatatttgaggcctcatatatgttagttactagtgctaagattctaggcaaaactagtcaggaccagcaatgatattagtcagcggtcgctgacgacaacagtcacagcagtcacccgatgtgagtggactcgatcatttctaagacccatttcctctgagagattattggcattgtgtggaagagaacacgcgtatgacagcctccatctactccgtactcacccctccttttgatcgacacagccgtggatccacttcagatgagtgaccttcagaaatcatttgccaagtcaaaattggccaaatttccccccgaagcaccaatgcctgagtcaatgagccactcagaggatgcatgggaggatggctcttcggcttcctcgctgtcgtcgaccgggacgatggtcccgtcacctacgcgacagctattcgcccgaacgggacgacggttggtttacttctccaatttccataagctcaatttaggctcaattgcctatttgcatcatccaattgtctgggactaggctaatatacgaaaacagacaatcatctcaaacctctttgacatggacagacttctttgaccaggaactatttcttccggaggatgttgataatctccatattttacaccatgtctatttaacaccaccgactggatcaggcccgctttttgtcatgcaccatggggccggttcatctggactttccttcgcgacgtgcgcagaagagatccggaagatcctcccaaaggcggggatcttgtccctagatgctcgaagccatggccgcactgtcgttaccacattggacagtgagatagatgatggagctccttctacggcggctgcagcccaggttgaggcctcgggaaacgttgagctcgacctcagtcttgagaccctgagccgggatctagtccatgtgatctaccagacacaagctaggatgggttgggagaacctccctgatatagttctagttggacacagtctaggcggtgcggtgattacagatgtcgcgaagagaggagagctgggtcagaagctattggcatacgcggtgttcgacgtagttgaaggtactctcgtcttgttggtttatgtctatctgatactgacatccccatttgacaggatctgcaatggatgctctccagagcatggagaaatatctttcgactcgtccgacccgattcccatccctgctatctggaattgaatggcagtacgtgtccatctcgactgtcatttctttacattatcgctaacattacaagtactcgctctcgcacaatccggaacaccacttccgctcgcgcctcggttccctccctcttatacgaagaaagcgagcctagcgacccgtcccgcccttgggtttggcgcactaacctctccgcaacgaaacctttttgggaaaactggtttgttggcttgagcagaaagtttctcgatgcaagaggtggcaagctattactacttgctgggaccgacagattggataaagagttgatgatcggacagatgcaaggtatgggtttcgaaagtccctgtcagccatgtataataattcggtaccatgctcactacaataccataggcaaataccaactccaggtcttccccgaagcaggccacttcgtccatgaggatcagcctgcaaagactgcgcagatcttagcggatttttaccgacgaaacgaccggagtgcattggtgcttccgcccaaggtggcggatatgcaggcatcagcggcgatgaagaagggaactggtgctcctggtggctcaacagcgcaccagaggtagtatttcatgatttgtcccaatgcttgaaatgagatatgatatccaatgagaggctattcatagatgtaaaacacatgctttcgagcagtacatctataacgctctttctctaatgctatcacgtctactccgtacggttgatgaggttaagctactcgcatgtagggaaataaattagaaaaagtttcattctcgaacggggtgaaaagatcatttaggacaactagcaggctagcctccagttcggagctctatgccaccccattgcgacaaacgttaaagtgaaaaaaggaaaaacaaaagctgccgggcacagaaaaaaggttcttgcctctcgctcgataaacagagagaatcaggttttcgagattccgaacgccaccgggatcccatcacaagtaatcatcatgcgaggatcgtgaaaagggatgtgataaaacaaggagaagtaagggtatcctgagagagaaaaaaaaaagagagcgcatgacgccaagaaaaacggacctagatgccattttaaggcaaataggcaccaccagcaaccaccagattcatattggtgaacttgaccctatagacaggagacttcttagtcgggaacgcgctgatttggtcggcggtgacaacaacatcttttcccttctttttcttggtctggcttgtcgaggggtttgcggctgcatccagtctggttccagtgcctgattcattgaggatacggccaccctgagtggtttcctgggaaccagcaacatcccagactcgcacggttccatcggctccaccggagaccaacactgtggactccacactccagctgacagaccagattccacccttaccgtggccacgcatgcgcttcagcagtctaccaggagctagatcccacaagatgatgcagccctggtcgtcggcggatgccagaagctttccatcgcggctgcactccatcgcggtgatactaccagtgtggccagtaaacatgcggacagcattaccagtcgagacagcccacatacggacagtgtgatcagagctggcggtgaaaatgtatgccgagttggggtggaagcagacgacatccacgtcctggtcatgaccgacaaaaatacgctgctggcggatttggtcactcacccacaaacgggcggtcctatcagatccaccggagacaaagtagtgaccgaagggcccccagcttaggtcccagacagggcggtcgtggcctttgtagacaaccatacattgccagctatcaagggaccaaaggcgaactgttttgtccatggatgatgaaagcaaccagcgtgcattggttggaaccttgtcatcctccgaaatgccctcgcgagcagtggcgcagggctgaaatgcaacagcagtgacgggaccggaatgaccgataagacggcgcgaactggcaggtggtgagttatcaaactcagggtcagcagcttgaatgttcgtgccatcgaggctccaaatccggatatacgactgctggaatccgacggcaacaatctggctgtcatctgaaaagtccatgcaagtgacgctgtatatttgttagtaaagctctgtattacgaagattgtccagatgaacatacccatcataagtgttgtggaatgtgaacatgcacacactaagtccaggaccgacaccacctgtgcgagccttgatctcgaaccgatcacggtgttccatgactttcttcacctcaatttgaacgtcacgagcagtggacggagggaaaggaatatctgcacgactaggtgcttcgtcgtcatcttcattcttaatcatttggtcgaactcttgaatgagcgtgttacggccagcgagaggaggttgtttcgcatcttcctcggctaattcagcccgcacatcctcctctagaagctgttccatagggagtcttccgagtttcaggcgaggaagtgtgccggccatggccgggttgtcaccggtgtaagccgagccggggtggtgtcccggaatgccttcatcctcagccgggaaggtctggtctgcaccgatctggttcaacatggcagcgaaactgaatcggtcatctgctgctcggtccaaagtcttcaccgagcaaaagctgctgagaattgcgttcatgacagaacccccctccttgtccttgctctccaggaactggagaagattggtgtaagcagggttgcttaacacaacgcggtatttgttgtttcgataaagcttagcaacggagttatcttgcaggtgctccggtaagctgataggctcgaagtggcggacgtcatcggtatgctcgggaaggaacatgttcttgttggtttcgaagaatgacttcgcatcctgaggatagaaggaagtgaccatattgaaaaaggaatagacgaacagcggccatagaacacgccgaagttcaggctacaagacaattagcattggcttatcaagtcactccttgtctgtcgcaccttgtacagatcaagattttcctcaacccaattcttcagtaaatctagtgatgcattagttgctatgttgggtcacctgaatggaatatctagctcaccaaacccttgtcgagtcttgggacgagaatcttcccccagctgagggagcggacgcccatcaatctcctggttggcagattccatgcgcaacattgcctctgtacggctgtagcccttcttggccaaataatcaataacctagaaaataccgaaggttagcgtacaattcaaaccgaatgtatttgagcaggaaaaaaaaaggcaagataagcaagcggtgcaggaggagggcttagtgaataaacacactgccagatcacgttcgcgtgcctgctcagaagtgagggcttgtgaaggctttgcgatgggtggacacggcacatattgtgccggagtcatatcagccgccaccggctcatgtcttttctggatcatctgggccggtaaggtcggttgtgggtaccggcgaggctcgaaatccttgccgtgagtttccatggtgtgatgttttgcgaaagcggtgcgtttgacgtgaaagtgaaagaaattgatgggttgatgggttcataaagacggataacccgtatgaatgataacgtgaaagtgtgaagaatggttgggtgagaaccgcccgaagcaaatcattgtttggctctgagttgtgatgccttgagtcgctagtcacagaccttgagcaccgctcatgagttgcaacgcgtaataccagcaggtcaataatgcccttcgaagtctgtgagatgaaccatattgtcggcgttgcagataagcccgcgcggtcctctgccatggacttctgtcatcattcataggttgtaacgactgatgaacagcgtaattgaggactcatggcattttcaaaatcatcgacgttgatacaaaacgccccagagtctccgatttggatccctgacatcactttgatctagtggagttgtggccaactcaagctcctcaaactcggctgatcctaaaacacacaggatggacataacgtgcaaggaataatcatcgcaaagggacacagggacgggagggaaacaagacttctcaaacaatgcacaaatgaatcagaagggtacctactatttggttcaaattctgctgtgacatagcaccacttggtggtgcactaggccctggggtgggtgcggaatgaacggggtttccaggcaatggctgctgggaaggcatcgccataccattcccattgacacctggtcccatactgccactgcgtggtccagggcttggggctccaccttgtgccgacatagttgtcgattaattaacgacagcttcgagacagattctcagattggggtggaggatggaaactgagctgggttgcgtgcaatcgcgggcaatttatgatggtgttgggcggtcagctatcggttttttgtctaatgtatgtagcaaacaaaggtgttcaacaatagaataatgggtttgatatcttgaatttgatagttgctacctcaccgcctattaagacctccccaacttccggcacgtgatttcaactaacaagcttcctaagctccattcgttctacactggaaaagctggtggattgattcatacgcacccagctatctgtccttttcctttatatcaaccctgactagtcacaatgagtgaagacgcacccccgcaggagctacctagctatacctctgccgatcgcattcgacagctgaatgagatggataaagtactacgaacatataatttttgcaggaaccctttgctgactcttcttttctttgcaaggatgtcaccaaacttcttcattctgctggtctcgcgatccaagccttgaccaatgccaaaccaggcccctcttctgttgcaccagatggatcacttgactcgcacaaaacgcgattcaaagaagcaagtgcaaaatacttcgcacttctctcctcagccgatgtatccctccgccgccagatctactccttagaggaatcatccctcgtagggcccgagagggcctcgcgcgcaggggacgtaaaggctggagccagaaacgaaggagccgcgggagctaaatcgcgagctccaaactcactggatataagtcggctcaatagccggaaggatacagttggaaaagataaggaggctgaattgtgggcggccgctcgtcaattcgttgagcagatgcagaagccttccgagacaagcaagaatttcaggtcagcgaatgaactagatgatatgcaggtggattgagcgatgaattatcgattcattcggtgcgattggttgagtttgcttcatatgttcatgataccccgggctatctcctgccactggcgtttgagattacgaatacaatgagtgccattggagaagatacatacatttacaccgtactaagtacatatgtaatcaacgctaagaacaaagtgtttatggatcagtgttcgagcatgttcacagaactacgctatgcaaaaagagatgaaacggcaggtatagttcatcggtctagcagagtaaggaaaatattacttctgcatggacatgatcatttcccgctgggtttcccggtccctattcgcatcggacaatgggcccaagcctaggttaatgttagcatattgcaacggcggtgatactttgtgcatccacttacttcgcagctcgccaacgacatcctttgccttaccgaagtaaacctcctctgtgatatgaaagtctaggtcagtccaaaatcctcaagtcgttaaacggtgacgagagaaataaacgtacgtagcaggttccgcatcttcagctccatatcctccaccagcctgcccacattggcgacatggctagcatcagactctacaggcagatcaacttccacctggcgagtcatgttgccgctgaggtccatgtcaccaagagcctcagttttgttggccaggtggaggataacagtactagtgagtttgtaatgggacatgcgagcgcggtcggtggcctcaaaaacgtgaatgctgtcccattcgccggagctctgggaacccggggtgacacctaatcaaaaggaacagttagccacgatctaagatataggaagttatccgcaatatgtccataacgcacccttcttcagtagaatcacgccggcaaatccatcgtccaaatcccagaaataaacactccctacgcctccctcatagtacagctcgcggtaaacatcgaacgactcgttggcggcaacctctagcttgcgcactcgctcactgggcacggtgccatcctcaagtggaggatcaaattcattgctccatggtgaccggtagctatcgccgtcgcggttgtagtcgcagagcagatagtcgcggttgctctgcgggcagcggcgaatctccaggggctggtcaacggaggagaggagatcttcggtgagctcggggacgattgaggtgatggcttgcaagttggtcttggtgtcccgtgggttcaggcgccgaaggaggtcgctgcagaaggggtggtcagctcacttgtctccgactacacggggcggggttgagtcggggtgtgggattgtcatggcggggtatcatagttgagttaaaaaagggtctatatggccatattaattgcgagagagattactcacagcgcgctgtcaaattgtgcatcagccatggttgcgaaggttggttgtatatctgttgctcaacagatggcggtgttgatcttgggcggatgaagtgcgtgtgcattttaggctgcttgcgtggcattacccgacatctataccaatcgtaatacatccacttctatttgcatccataaaaagacaagaaaaagttagacgaacgtagagctagtgatatctgtattcaagctttgttttatttgagcatatttacttcgaataccggcaaaatcttacaaggaaaagaaagataggccaatgtcggattgttggatcttcggagtttttaaaagaaattgagaaaatcattattctcggatgtattcaatgtgcttttctggagaatatagctattctaggcccatcattcgactaagtctgtgagtctggaatatcttgaagatcttcgacaggcgtgtctagaatgcagggagtataaaagagaatcaacaagttgatgatgtgaataaaaacctctcttaagtagaaccagaagagaggctcatctcatcctgccaccacctcgcaaagatattcaacctctccgtccttaccttcgccatctctctccccgtggcagtcttcatcatcccctccagcttaaccaacttgtccccaaaatgctcaatggaattatccatctcccatttcccatcaacacagtacttctgccctacagccccaaggaaagtaaaacacctgccaattccaaccgccccgattgcgtcaagtcgatcggcgtcttggacaaccccaagctcgacaaacccatcttcatcaatcatcctccggatcaacgccggatctttgcattcagtcgtataagaaacatgtgatatgacggtctgcacccgggatgcgagttctggtgtcgcaccccgcgcaaggagcgcgtactgcaccatcgtcgttgggtcgagttcttgacttccaggagctgcgtccattttggataggtactttctgtcaccgatgtcatgcaacagtgctgcgagcttgacgactgccccgttgtattgcgttgtcgggtgcagtgtccgctctgcttccaggatcttgttggcaagcgctcccactctgtgaacgtgtgctgggttatgcgatgggtcatggcctgacatgcagtcagtcacgaaagcggacatttcgttgaagagcgtttggaattcttcactggtatcatccattgttgatgattttgatccggttgttgtggggttggctatttttggttggttcggactgaatggtacccaagacctatgccaacggtgcagatttgattttattaccgggatgactattggttcttattttcctaggcaatagcactatattttgaagaaagtaccgaattatccccgcagtaaacaaatttggcggtgaatgacactcatctcgttttatatacaccgtgtttagtgcaaaccatacaaacaaaacatgatcacctgactacgcgacgcgacgccagatgattgcacatacggagtgcaagtgcaatgcctttcaactatccacgcgatgtcgacagattccgagtcagattactttgatgatgatgacttcgtagtccctggaacccctgatgagccctcccgtcccgcaaagcggcgccgcattcgaaatcgcggggaagagcgcgaagatcaagatgacgattcctcaatcgactcgttctttgatatgggcgatgacgagttaccccctgggcgccgagaatcacctcatcaggatcgctccaaaattaagagctgtgtactgaagcaacccagtgttcaaaatgacatgtttgtcacgcaactcacgcaaccctcctcaagtccggaacgaatacggggcgcacggtggcagaagcctacagtgaggccccctccgccaaaatttgaaactagaagacaagatggtagtggtggacaggagaatcatccccatgatgatgaagagctgctggccgctctcgcagcttccttagattcatttgaggaggagaaaacgaccagagcggtataccaaccctcgagtttgtcaagcaatactgtttcgaaaaagattgtcctgccagaaaagacagatacgcatctatcggcggatgtgctgtttgagctggaggacataccggaaggtgcattcgattcttcgccatcattgtcaccagtagcgcgatcagcccagcctgcaggtccacaatttagtcaatcccgaggcccaattagaggacctcatctcagacagactacattattcggtatggccacttcaaaccctgaggcctcggaaccgcgccaacaagattggggcccgtcagagaagactgaaccaccgacccaacacaaacttgtcaaagatgctttggatacatgggtctaccctacgaacttgggcaaaaccagagactaccaattcaacatcactcaggcaggcctgtttcataatttactcgtggccttgccaacaggattgggaaaaacattcatagcggctacaattatgctcaactggtttcgctggacgaaagattcgcaaattatttttgtagcaccaacgaaacccttggtttcgcagcaggtatcggcctgtttggatattgccggaattccacgctcggagtcgaccatgctcacgggaggggcatcaccgggtattcgcgccgaagagtggaaatcaaagcgggtgtttttcatgacaccccaaacactgatcaatgacctaaagaccggaatcgccgatcccaagcgaattgtgttgttagtcgtcgatgaagctcatcgcgcgactggtgcgtatgcatatgtggaggtagtcaaattccttcggcgcttcaacaacagtttccgcgtgctcgcactcacagcaacgccgggatcaacagtcgaatcggtacagtcggttatcgacggcctggacatagcacgtgtcgaaatccgtacagagaactcgatcgacattcgcgactatgttcacgctcgtaatatcgaaattgaaacatttgagaattcagatgaaatgattttctgtatggatctcctatctgtggccctgcagcccttgcttgaccaacttcggactctcaatgcctactggggacgtgaccctttggggctgactgcgtacggtcttacagtggcgaggcaacaatggatgcagtctgacgctggccggaatgccaatttcggcttgaaaggcaaagtcaactccattttcactgttcttgctagcttggcccacggtatcgatctcctcaagtaccatggcatcgtgccattctatcgcaatgtcatccatttcaaatcaagctccgagggacagaaaggcggaggtggtaaataccaaaagcaagttgtacaacatgatagtttcaagaaactactcagccatcttgaaccatggagtaagaatccagagttcattgggcatccgaaattagaatatctcaagtcagtgattttgaatcacttcatggacaggggtgaagggaaagagttgcctgacggcactagtcagcccacgactcgtgtcatgatctttgtgcatttccgtgacagtgctgaagaggtcacgagagtgctcaaaagatatgagcctatgattcgtcctcatgttttcgtgggtcaatcaagcgccaaaggctctgaaggtatggaccagaagacacaactcagaaccatcgaggatttcaagaagggtacatataacacaatcgttgctacctccatcggcgaggaaggattggatattggagaggtcgatctgatcgtgtgttatgactcgtcggcgtcgccaattcgtatgctgcagcgcatgggtcgaactggccgtaagcgggccggtaacattactctgctattgatgaaaggcaaagaagaagactcctatctcaaggccaaagataactacgagaggatgcagcaaatgattgccagtggctccaggttcaagtttcacgacgatcgttctgcacgcatcttacccgcgggcattcgtccagttcccgataaacgacatatcgatataccccaagagaactcgcaacaagaactgctggaaccgaaacgcaaagggcgagcaccgaagcgacctgccaaggtgttccacatgcccgatgatgtggagacagggttcactcgagcctcgaatttggctggcgacaaaccccagaagaagaaggccactgtaaccaaaaaggcaaccacccccaaaaagagaccccgggcccccacacccgagcctgtagatgttccgttgctggaggacgttgttcttagcacgagtgagcaaaatgatcttgagcatcattatcaaaacatcggtgctacttctccgcaattcatccgattccctcgcaacgacgcctttccacgtttgcaacgcattgaaagacccacaaaggatgtgaagcatgggtctctcacgcgacgcatggtaaaagccttacagaagatgcacgaggctggccctgactgtgatcgtcgattcaaagagattttggcccgcgaaccgccttcgcctgacgaatccagtcagacgcttcggagggattcagccaagaagcctgggcggaacccaaaccctttgaaaacaccgtctaaaaatactgctcaacgagcttccatcaaggccactctcacccccgctggcggggaggttgtttctttgctgtctccagatcgtgaacacaatcagaagaacgacccctttaccttcatggatgatgacgatggctcggattttgagttgatggatgccagtcttttgtttagtagtgggtctaaatcgaagagtcggagacagaacagaccaattattgaagatagtgacgagtgatgaaatagaggcacgcgttgatgttatctggatatagaaagatccttgcctcattcgaacgtaggaatgatattggatacagttgcattcccataactagacctacatgggtacgtacaatactgaactttatcgtcttcattttgttcgtcgcagaaaaaggaacgaaaaggatggtaacttggaatagattgtatttttttggggcttcgcagctatctgtttcttggtgattgtattccattctagcttagggcttgttgaaagagtgcataccactcccgctgccttcaaaaaaaaaaaaaaaaaagaccaacctggctgtaaatcatcaccgagtctcccgtctatcagaacataagaacattcggggttggggtctgggtcattgggtatttgtgtgtttgtgaatgatatcaaacgtgtagtgtcaatccgagagcaaagaaatcagaaagccgaaaacaacccacctcgagagaaagatagataatatgggtttatgcaagtgtttagtatgttgaaagccaacgcgaacgaaaaccgaaaaaggagaaaggacgaaagaagaagcaccagactccagttgcgatcagcgacgaggcgcgagcacaacttctaaatcaatgtaaagagtggagagcaaaggaaaaccagacaaaaaagagtcaattagacgcggtcacgagcaaagtcaaggacctcgcaatcatcctcaaagaaaccgtcgtcggctttcagcggagcggagtgtctcttcttgcggcgggtggtgataacaacttcctccacgttgccggtgctgtttccaagtgtgatgaggttttctatatctccgccagccccaagcgagtgtccatggatgacagcgttttcatcttcgtcatcgccgtggtcatcgctggagctgttgaatgacctcaagtgcactttgatcagtggtatatcattgccaaagacccattgtccactcggctcacttgcatcgctgcctgaggagaagacactcaaactgacacgctggtccgtgtggaacggctggtatggtgtgtttgtctcgatctcagcctgcgagagaggctggcaaaacgatctcgcagcactagatggttgatagctgaccgaaggtagaacaatagaggcatgaactactacttctggatcaaaagtagacaaaggagccggtccacaaggaccctgaagattatcaggcagtttgacctgggactccttaccgccaacaatagagtgaggctgcctgctcttgtggccgggtacagtagcacgcttgaggcggtacatcttgaagtacccggcatccagaacacccaagaatataaggcccttgttgcaaatccacgtcacccgagaaggtgcaggatctcgagctagccccggcaagtggagacgattctctccggcatggcgtagagtattgacagtacccgttgcggcgcccattgacttgcttaggcctgcggcgacaaccttcccgctcttcacactggcagcagaaggtaatgcaaatccactcatattgggaaatgcagcgcccgtggacgggacacgaccacggacagcggagaagaatggctgcgttttaccgccaactaacttcatggccgctgacaatgggttactaccggaagcttgactggtcatctcatctgccatgggatcggtagccggtggcttatttgcagtagactttgcacggcggaatgggggccactgaaatgcgcttcggggtagatcgaaaacgtggacggtgcctttacgtgtaattacggccaatctatcacccaccggtgccgtccaaatcacatcaacgatactcgatgtagtcaaccgtgcgtatctagcaatctggcgcacattgggattctgtcccgtctggtcatcagccataaaagccatggaccggcagtgcttgagttgcatgagatcccacacgtattgcacatcgcctttcttactcgctgtgaacaacatcaagccgttcggagaaagagacaagaagctgcaaccattaggaacctgaaatgtcgacactgggtggataaatgcatttcggatatctgtgccgtcttcgaatcgtcttaggtcgattatggatacggtgtcaggctctgttgctgatgtttgtgtatcctgagcatgggttggagggaataatccatacccctgtgtctggaggtccaatccctgaggtggccgacgtggagagctgccggatggttgctgggtgttccaataattgttccaggcctgcattccctgatcacccatccagcgggcacctctgacgagttcttgggcaacgcctctggccattttgtcgaagaaactttccccttctcctacatctgtcgcacacgacaccgaagggacagcaggaggactgcgagtttcaatgcccggaaccttgccgatgattaaactcgaaggtacagtgccctggatcgatcctctgtaggccgaggatgggggagcgaatgcaagccaccttccttgtacagctaatatgggcctttccagggtagagaaaccatggggagagtcggtgcgagtcccctctggatcagttgtagaacttgaagaggttgagtaacgacgggtttctttggattgaactccagtccatgtcttacccaggcactggtatgcagttgtttccggggataggatatgtctataaacataaacttccccgctgacgccggatgccaagataatgtaagcaccagttgtgaagatctttaattttcccacaggcgagggtgcaaaggatgggaggccgggaagattttctaggcatggcacaggcttacttgcaaacagggtgcagacatgttcgctagtccggaaagagtaaatctcaactcgggtttggtagaactggatgtcgtctcgcgcgcacttgtcgtaggagtgaccgcgaatagtcgaagggggaatttcatttgcgtccgatgttgcagacgagactcgaccttcctcatcatgcggcggcaacggcccatgaacaatgacagccacatgcggccgagaggatgcaaagggatcactagacgggtagccaggcaagagtttggcctcaattacacggccatttaatccagtgatctgccccacgagcctagtctggcgatcttcgatggcgaggatctccacggcaccatcgatcccaaccagtaagacgttcattcctgtccgcgagcctttagatgacaagctaggcagtgtatcaaagccacagaatgaatagtttccctcggcgggggaccgattctgagttggaataatctcaatgtccggtgctccgaagaaatgtgcctgaggaagatgtgggggaggcgcgtgattgctcattgggctcccgtaagagtgactctttctcctgtctatagactgttgcctcgagtgtagaccacttcgataggcattaccatagctagatggtaaagttcgagtctgaggagatgccgaggaaggatggctgaagccactcctttcttgaattgttggaaagttcaagggtgatgtactaggtagtgatgcacttggtatatcctcatccataagatcggtgggggggctctttccataaggtaccgattgcgcccacgtatcggtgcggctagtgagatcgtcacctgctggctcatcgagggaaccgaggacatccagaacaggcgacgtgatagatgggtttacatgacgttcaataaagggttcagggtctgggcaggagagaggctcctctggtagtgggtcatatggttggatgctatccgtgaaatctggtgttaatggcactcattcatcagaaaaacaggcaatcaccggtggacacatacatatcatccggtggggtttcagttgcagccctggccaccttgttcttcttgcccttcttctttttgcctttcgcacttggttcatgctctgatatagtccgatgctggtccggggcgaatgggctatcgtcttcgggcaaacggctgtgctggcggatgatatcgtcaggtgccgccgggagcattcaaatagatgatgcctcagtgagaggcgataaagaagcaacagaacgaagccgctctcagtaccttatttgtggtctgagaacggatatgcaggatccttctgttcaagatcctaactgggaaccgggagcttgggaggtatgactaaagaggaggataactttcatagaatcaatcaagtgatcaaacatcacaacggcctaaagagactggggacgcgtacctgttttgacagtatccttaaaaataagggagttgtggtgaacgtagacaccactaacagcgtatctagagcggagatcaccctagacacgcggggaagctttgctaaataagtataacacagcaacagcttgagatagttcaagctggtgcagaaaaatgtaatccaaaatgacttgcatacacaagttccaaggtcgaagtccgaagttgagtcaaggaagaaggatgatgttatggttcgcgataagaagaagagggggggagctgaccccaggtcaccagtcaggtacggggctattagggtgtaataggggggcctgagtcagagcacgaaataaccctctgacagtgtcattcctaatgaaagtatgatcggattctcggtctttactctcctttgtctgtctttgtttctatcaccaatcttgactatgactgactatacaatgcaccttgtggcctacacgaacaagacgcatatgaggggaaacttgtcaaactatgcaaacaccgataaggctcttagtcatctcttgcgtcatggattgcttgctgcaaacgtccccttgctttgacatggtactgcatggttgaagtcaacagccgagtccatccgtgtccttgctggtcattcttgacaattccttgtttgtttattcaataaagttcgcctgttgaaggagtggctggtgtcatcgttggctccagccagaggtcacagggcatttgcggcatggccaaagatgacgacttgcctgggctttgacagcaaatgccgtttgagctaggaaatttgagctctttcgttagggctacgtggtaattcggttcatatatatttacatatatatggccgctttatcctccactattcttgcgggccatgttaagtatatccagactgaaagtgtttgtaaaacggttaatgtaataaaattaattaactcgagacgtgttttgatagccactgagctttgaaatagttgatggtacagaatgttatcacagagggttgccctctctcctgatatgatatccagggtcgcttaggtcttcttcttattggccgcggccttagccttggctgccttcttcttgttgctattgatcatgacaattccgataaaggtgcctaccacagcagaagccaagagtgttaggatgacggggatgcggatggcccaaacacgaggcgggaagatgtcgtggagcgggtggccggggtcgacgaagggctgtggaacaaaaatgagtatagaaaagcaaatattatcataaattagcataccatcaacagggtccacgcggtgtagtagagaaagatcgcagtcgcgaccagaagcatgacggatcccacgagttggcccagctaaagcacagtcagtggggtatttccattggataagactagataatttaccattctgataaagagcggcgctgttaaaagaaaagaaatatgaaggaacgtggatgaatcctgggctggacagaactaccaggaatctcaggagctcccgttattcgaagttggcctctggtcacgtgcaccgcgctagagctttctcctgctgcgtccttgaatcatctagtaacctcagtccggctgagattcacaaccactgttcctccggtgtacatcaaactttctagctaccccggaggcctctctcctcgttgaagatgtccgatttggatgttctccagtctgctgtgcgcgtgcccacgcctccacctggcgcgtcgtactcgccagccgcagcctctcgaaaacgctcacctccatctcgttcccctcctccaaatcgtcgccgatcccctcccggtgattcccttcaagatggttccgatgttctcaaagccgatgcagaatatgccgacgacagagaacggcaactcactgaacgtgttcgcgaacatgagaagcgcgaagcagcgcgcaagccgatgaccgaggaacaaaagcaggcttcagcaaaggcagagtacgaaaagctgctcaccatgcgatctggtggcacttacatccctccggcccggctccgtgcgttacaggcgcaaattacggataaaacgagcaaggaatatcagcgcatggcatgggaagccttgaagaagtcgatcaatggtcttatcaacaaaattaacgtttccaacatcaagttcattgttccagagctatttgcggaaaatcttgtaagaggccgaggattattctgtcgatcgatcatgaaggcgcaggcggccagtttgcccttcactccaatttacgcagcgatggcatctatcgtcaacaccaagcttccgcaggttggcgatttgttgcttgcccgattgattgttcaattccgcaaggccttcaagcgaaatgacaaagcagtctgcatttcctctacgactttcatcgcgcacctctgcaatcaacaagttgcccacgagatgttagcagctcagatcctgctgcttcttttgcataagccaacggacgacagcgtggagattgctgtgggtctcactcgtgaagtcggtcagcatctggaggaaatgaacgctcctatcgcacttgccgtattcgaccaattccgaaacattttacacgaggccgatattgataagcgtgtgcaatatatgatcgaagtgctctttcaggtgcgcaaggatcggtacaaggacaacccagcaatcaaggaggagttggacctagtggaagaggaagatcagatcacacaccgtgccggcttggatgacgagctggaaacacaagacactctcaacatcttcaagtacgatacggagtgggaggaacacgaggaggcctataagaaattgaaggccgagattctgggcgaggatagtgacgaggaaaatgaggacaggtcagatgagagcgaagaagaagaatccgatacggaagaagtacagatggatattaaggatcagagtaatactgatctagtcaaccttcgacgaacaatctacctcacaatcatgtccagcattgatttcgaagaatgttgccacaagctgatgaagatcaacctgccggccgggttggagcatgaacttccatccatgatcattgaatgttgttctcaggaacggacatactccaagttctatggcctgatcggagaacgattcgccaagatcaaccgactttggtcagatctgtttgaggcggcctttgccaagtactacgataccatccatcgttatgaaacaaacaaactacgcaacattgcccagttcttcggccacctcatcagcaacgatgcgattggctggcatgtcttatctgtggttcatcttaacgaagaggagaccacatccagcagccgtatctttatcaaaatcctattccaaaacctcgccgagaaccttggtctgcctggacttcaggcccgctttagggatgatattttgcggccgagctttgagggtctcttcccgacggacaacccacgtcacactaggttctctgtcaactacttcactagtatcggtatgggtgtattgacagaggacatgcgtgagaacctgaaaaccattccccgtcctaccgtgcccgctttgcctacgcgagccgcctctcgaagcccctcgcacaccccatctgatcgatctcgttcatctcgttcgtctcgttcgatgtgctcaacgtgcactggatctcctcactcccgccgttccaggtcaccttcgtactcccgctctccttctagggaccgcggccgttcctattctcgttccctcactccctcttcccggggtcacagctacacaccttcacgctctcggtccccagtacatcgccgtcgtgacgcatcagacagtcggtcccctgtccgtcaccgccgtcgtgacgcatcagacagtcggtcccgggcccccgcaggacgatcccgatcccgatccatttcccgtacagcggccaagcgtagtcgagcacgctcccgctcctactcgcgaagcccaagtcgcagtccctatcgatctcgtcgctcggttactcggtctgtcacaccgccgcgccgaggccaaagccctcctagccggagaaatcgcagctactccagatcagtttcccggtctgccaacacccgtacctcttcgtgagccggtttcccgaggttcaaaccaagattcgtccgaatccgtgtcacccttcatatcattttcattgtagatcttttcactagaccaaaacgagtcagcctagtgggggtctacgatcaagtttcattgcgatggctcagggtcgtggaagagtaatccacgaaaggcctatttctcaatatgtaatagagagccttttaacaagaaattccaaattagcttctcggcattttcccacagaataggtcactaattcggttttctatatcgtgtcgtaaatcaaactgcccgagcgcatcaatattccaccttgcaggaattgccggattttgctaaaacgcatgcaccccgcatagtttcgatcccccattaggaacccaaaaactatgtcaaaaatggttcgagtctgaaaggaaaccagtcgcctatgataatgtgtaatgaaagaagggttaacaatcgtatcaaagaactggacaagggcctggcaagagggtagggctaggaccaaggtctggtaggttgagttttgatgctaaagatgagtttattgaacaatgctagcgagaagatcatatggctatagtatgaagccagggtttctgtagagattatgtttagagaaaccccaagataaactgcagtgtagtgactttctagggctggaaggttccaatctttacaaggcaaatttcaatacttcacggtgtgtttattgagaggtcatctctgccctagtttttctccccttcctgtcttgattttcagcgcggttatagaacccctagattccaatacgagagattgccctacccatatcgaactaaactagctctacgcctttctaaaagatcttccacctttactgtaaggatgtttattgggtatatatttttcgtagaacactttactattattggcgaaatatcacgccaaattcctgaatcacctacgtttttgatatcaacttagcttattattgatcaatttagtcgaaaagccaaaagaaaaaagtaagttcaactatagaaatgtctgtcgagagctttgttactgaaactaccactccgaatcatcgctctggattggttcttcgtgctggaccggttcctctcctcgggccttatcggcccaagcctcgagcttcagagggcttctggtgcaataaatcagcacactcctggtggccatcgtgtcttccagcgcactgtgtccatttttgcctctctggatcttgtaaccaatcaactcattggccaaggttttgagactccaagtccggcggaaaggttttgcaagcggtttatacaccgcatcggcagtgagaatcgcagtgtcgatgactgtggagtgtataatgcccaggacgttcaggtcattatggagggcgtgaccaacgagaatagtcctgctatccatatgctcaaaaagcatggcccgagctaccttccaacctttaattgcaacccccttcctgaccgcagccttcatgtcagcacatgttacaccactccatctggtatgccagtttcgaacagtgttggtggggtggacgaaatggttgacgagaacctctcctgtgaggagatccaccactaccagaaaggcaagctcacggcgattgcccataacaccgaccatctcacagtcaatggcaatggcctttcgactggtttggcttgggtttgatgggggagtcgtcataaattcattgtatctgatcacgcccccggcggggcgacgagaaggagcaagaggataactggccacggttgtgaagtgctgtttcttcagctggctatctaggtgaacacaatcttgcaggtggatcaaaagccactgctgctcttcggggttgagaatgggattggtgtggtcatcaggcgtgatgatgggattttcgtgatcctcaagggtgagaatgggtttggtgttgactgtcattttaagcgtagtttggagtagttgtattagttatagaagctcaagttgtcgctcaaatggtgaaagtagtatatggttgatgttgagtttcaatgagatagataagtttggaagggaagaaatctattagggattggagtagacaaatagaaacaaaagtgaaatataggagtcgaatgcaccaggcagacatcgcaaccatgaacagacaccgcagctgtaaaagaaggcgggcttgggatatacttcgaaggttgcaaacttttgctcatagccagtcctttcagataaactcactcgtctatatagatccatagacaggcataatataagttcaactcggaatagtcttttctctttatagatagcgagatgagtgaatttggaacataagccattagccaaaccataccgtgtcttgttcatcgtcatgctctcgcgaacatcgaccactttctccccaacactaggtgagaacccttgccacgcataagggtccgtctctcggacttcgactgttgccattctatcgctctcacttatcgagtctgactgattctgacaagctggcagagtgtcttgacagccttggttgccggattaatgtcagtccacatggtggagggtttgaagatgaaaacagtgcaggttgcgacatttcaatttgaggagggttcgatacggctcattcccgagtacatcggtcttgccatcttgatgaatgcaattcatttctgaacaggacagaacataagaaatggaaagtcggaaagggccgaatggaactccaagcttgacccctcacctgggcattaccagagataagccagataagcgcaatttataaagctttccccctgtccagatgattttttattttttattttttatttgaaatattttctatcatgaaatatcgtttgtggttggccggcaaagagcaagatgggaatgcagatctgtgtgtgacggctatcttgacacttgaaccagcactgacaagtctacagcattcccattgaagatccggcaactggagagatcttcgcgcagtaagctaactcggagtagcgttcgatcccgtctaaccattgccagatgccacgcagcctcgccagaagatgtcgagaccgccatctccgccgcccaggcagcatataagtccggcgtatggtcgcgtgcgagtcgtcaccatcgtgccgatgtgctagagaaatgcgcaacgcttctctccgattccctcccgcagctcatctcaacagaatcaaaacagacgggtcgggtgattcgggaaatgaaggcccaggtcccatctttgacaaggtggttcaaatactatgcctccctgctaagagtcgaggagcgatccgttctaccgacgatggggaaactgcataactttgtcgaccgagtccctctcggagtggtggttcagattaccccgtttaatcacccgttgttgattgccgtgaagaagcttgctccagcgcttgctgctggaaacagtgtcataatcaaacctagcgagctgactccattgacaactctcttgctgggcaagatccttcgcgaggcgggaattccagacggcgtgttgagcgtcttacctggttatggagctatcaccggcaaagcactggttgagcatccattggtgaaaaaggtggacgtgactggtggcaccatggccggaagggcaattggtaggattgtcggtgggaatctggcaaaatacactgcggagttgggtggaaaggcgcccttggtcgtgtttgaaaaggccaacatcgatacggcgattaacgggatcgtctttggaagcttcatcgcaagtggtcagacatgtgtggccagcactcggattatagtgcaaaactcgattatggatgagctactacacaagctcaaggccaagattgagagcattacacgccgaattggtgctccaagtaacccggagtctaccatggggccactcatctccgagaagcagctacaaaatgtggagcgccttgtcaacagcgctctagatggagggaatgcggtcgctctcatcggtgcaaagcggatggtttctcaaagcccgcttgacggatttaacttcgagaggggatacttctacgaaccaacgctacttgcatccaacaacgggaataacagtattgtaaagacagatgtctggcgcgaggaggcgttcggccctgttattgtcgttgctggtttcgataccgaggaagaagcaatagcattggcaaatgacagcgagtttggattgggagccggtgtatggacactcgaccttccccaggctttccgagtttcggagcagattgacgcaggaattacttgggtgaatacccatcatcggaatgaccctagcagtccatggggaggcgcaaagtctgcgagtggagtcggaagcgaaaatggaatcgaggcttacaatgcctacacaacatcgaaaagcacaatcataaattatgcgtctcccgatgagtccttggctgcggatgactggttcggagatggctccggcaatgttagatatggttgaatggaatcatgttgctggtttctccggactctgttgcacaaatcctcgaagggatcagcatggatattagtgagtgtacatatgtagactaggtaacagacattattagcagaatacttcaaggcaatcgatcatatatcagttagaagagattatgtccagaccaatccacctctcaagtgcatttcacttcggtctgttttctacaaattcgtatcttctggcaaataaatgcataaatacataaagctagaacccagaaaaattagtaggtagtaaatgactgctagtacatactcgaatagccaagatatagatctaaccggtaagggaaatgcatgatgtcatacccatcagcccagatactagcaggttgggctttggttcatttcttcaagcatgcatcccctcaaataaattaatatttatgaaacctgttaaatcaaggaccggtactaatcttcactatgtcaatctggggtcgcagacaagaccataagcccacggagccatctggcacacaaaatggggatgaacatcggcatgcgccagaggaaacattcgaagaacctactgagcgctcaagattacttcctgcagatagtcatgaggggtttctaagcccagatgatcccgccgtgagtccaacaaacaaagctacaccaaataacacgctggaggcaaaaatcatagctaacacgagaaccaggtatcgccctacaatctatggagcgtgcgcgcggtgcacggtgcgtcagttatcgcattggcaatgagcttcatatggtggacattcctgcttgtctccatatttgtcagtccaccgatgatccacccgcgagggtcgggcttctttgccttctcatataccaccttggcgacaggatacctcgtccttggactcttatttttcgcagtgccatccaagtccatgacaatatgggccattatacttgccgttctacttttggttgatatgtttattatcctggctgcgccgcggatccgtcttgaagaaggctgggtagggattgcttctgtcgtctgggtagctttgatatctatataccaggccatccagaatcgagcagttgcttggggtaagcgcgaggaggaagagcgtcttactggtcgagaagagactcggcgctccctactggagtggattgctgttttcgctgagacgattctaatggctgccatggcgagcgctgccgtcatgttaacagcgactctgatcttgcgtgctttcgactctgggctcgaggctccaggcgagcgatacttggtgcatgcggatagctaccaagttcatctcgcttgtgtcgggaacaagactgcagacgacaatgcaccgacgattcttctagaaggtggcaatggaccagtcgaacatacattacaaccgttcatcgacgatgtatacggccgtggcggtatcggcagatattgttactgggaccgaccaggtttcggatggtccgacaacgcaccctcgccccattccgccggcatgtcagcggacgtgctagccgaagccttggctcttgcaggtgagacaggtccatggatagttgtttccgctggagttggcagtctttattcgaggctttttgccagtcgcaaccttctcgaagttcggggcattttcatgatcgatcccctccacgaggcatacttgggagacattgggcgacccggtcgtgggtttttgctctggcttcgtggtatcgtttctccgctgggattcgatcggctcgcgggcgctattttacgcgaccgttctcgccaggaccgcgttatcggacgttcggcttaccagtctggaaaatacatcaaagcaaagctacaggaaagcctcgtggctgtcaccatgactgcctccgagatacagtcttctcgccatatccagatgggccatgctcctgtagtcgttgtgagctctggtcaagaagtccgaaagaattcgcagtgggcagagcgacaggaggatctgtctcatcttacagataatcttttgtcttgggatattgctgacgatgcaccccatgaagtatggcatactggacaaggacgggcgatattggaaagacgtttgaaggagcttgtccaagaaagtcaggtacaaagacccatgagcaagtgatcactagtttgacatctttattcgggcgttcattgggattcaaataccgtacagaaaattgccacaattgtgtcttataaaatattatctctgcgaagctgatgatgggggatatgatgctatggcctagtagtacctccctcgcctgacgcgacgtcgctacatatgaatgaacatcacttgtatgtcggtttcttacttagtagcatctatttcgacgaacacattaatccaatcgagaacttctaccccatatctagaagaaattagaaaagcccctgaagcgagagcatcagtgaatcatctaatctcaggacacttcctggagggctgtaggatgccaactggatttgaggtatattcgtaataaatgcagtaaattcgggcagagctttagcctgctataactagccgacggatccaaaacttccattctcgcatcgaatctccatttcgggtccaggaatcgaagatatctcggggaaaaggcgatgaatggcctcctcgtaacttttaaggcaacgcggtgggaaaaaccgagccgaagggtctagggggagtgcgatgaaaaccgaacggcgggaagacgaaaccgatcactctaaactagctcccttaaacctcttagcaagctggtcactctcggggctgggagatatggaccggggtaaggtggagggtggggggttgcgacgtttccgggtttgggaatccggacgagaaggctcggccggtgtgggccaggggcgcttggggggccgctcaccactctcttgaagaattgtcatcaatgtggcccatcctggggtattcacaagttgcatgccctcggcgggggacttcgttctagcgacacggcagaggagtgattcctcatcctgttcgaaaatgcgagttagcgtcacgtacactagattgaattatacacaatagaataccgaccttgctaaatgtgcctactccatgcaagaagcacaggaggtggaagtcggaaacgccttgaatagctttatctggatcaccatgggacatgagttgctgggcaacgtgtcgaagatcttggctctcgccgatgacttcccgattctcgatagggaagcgactgttggtgaataatggggatggctctgttgggaatccgtgggtgagggtgactagtaggaaatcgactgggaaactcggctcagcgctctcctgtacgcttgcaccgtactcattaattcgtcggtagaaaacttcggggatgtatcgtgtcctgcttccgagatcttcgtcatgctctgattgcaccagcattacggtcgggtctgctgagggttcgacgatatctcctcgaaccatctcaactgcagacacggatgcttggtacgagctgatagcaatcgcacctgtctcatctccactgagcacacacgttacaatatccgagccgaactgtcctgtccggctccatctcgttgacttaggattttgtgcctggagtcgtgccgcgaaggcaatttcgagtgaagacaagaagtatgaatcaatgtgccgcttacaaaccactgaaccatccccaagcccgccatcaatcaagtcagtaaagatgacaccaaccttctgcaatccgcagagacgagctacctcgtccacttcattttcgttgtgccagtcatggagtgttacgccatcgatttcgcccgtttgcgggggctcgtagatcgcttccacgacagccttgacacctagtggtacttcggtgtattcctcgtatgtaccgtacaagaaacctaatcgttgagcgcctgactttcgccagaaatcaaggagggaattgattaaatcaggggatgagaactccacatggtctaccatacggaattcctggggttgcagactgattgcgcttggttgacatttggtgcaaattccctccggccaaggcggatgccccgatgggcagtcgcttcgcactcggtaatatggttcgttgagtggaggcatgaacgaggttcccatttcgggcttgttagtcgcggcattgattttccgcaggtatgagtggaaagagagatgcttgattttcttctctttcatgttgttcgcatcgtaaggctcgagtggcatgcagtaatcacacatgcctcggggaccgtgtctgcacatcttgtagtccattccacgcttgatctttccatcttttttgtctagcagatcgtccagcggtgactgctgcactagctcccacgggttcttgactggagcggaagaacttggttgttgacggatcgggaccgtctgttgcttggggatcggagctccattgagtcggtgttctgtggtggtagatgtgttgccgttcgaggctctatcctgctgtgcctgttcctggtacccaataaagagcttatcgccatgccttcaatccagcggcgcgtgagtaattcaacatgtagatgtaaatatgaaactcaacacttacttgaggccaacctgctgaagcgaaacccctcgtaggtcttccagtagtctttcctcaccacctgtgccgatcggtttattcgagagggcaatggacgaagcttcgacgttgtccgggaggtgttctagaatctaatgccgattgccagattagattttggctctcatcctgctatcgttcccttccaactaagagccgataaatacctttttctgaagtgacgggaagagttcctgcgggctgaccgtgagtcgaaattgtccgtttcgactctcaaatcggagaagaatggaggccatcctaagcaaaactatagcacggttgaggatgaggattgagaggtagtggcgtcaccttccaaggaacacaagtggaagaaatattcgaagacaaagaaggcacatgcaagtgagaagagaagctcgacttaaagcttccttggtcacgtcacaactggcgggcggtatggtacctggctgacagaacaccccgcggtcggctttggagttttgggggaggcgtcggtaaattcgttaccacggatacagagccttgaaatagagagccagaacctggacagtacttataaatactttcaaatggaagtgataacacagaactgcctcttgtagcatcggtaccagaggcaaatttggaaaatgtgagcaaatgactgtaggaggcagaaatgtgccctgagggtactaatcgtggaatgtaactatacatggatatatcaagttgagcatctacgttacaataggctcttgcaaaagcaattgagtaatcttcttccatatatttcttccattggctagaaataattggctgttgaaaatgagaatggtatgtccgtatcatcataagatataaaaaaggcgtaaggaacgccccagtgagaacagtctagaattagagaacgcaagaagagacatgggcccaatcacaaaattgtacagttcttaggcaaaccgcatggcccctcattgctcttcttcttcttgactagctcctgagtatccttgaaaggctgctcggtctttggagcggcctccccagcaacaggagtcgagctctccggctttgactcggtactgccatgcattcactggaccttagaaacagtctcgtagaaggccttgccctgggcggtggcaatctcgagctcaagcgcggagggcttacgggaaccgtcggcagcctgtagacgggatggtcagtgagagaaatgcatcggggagtgtcgttataacttacagcgaaggtaccagcaccccaggcgctaccgccgtgaacctcgtccaagttgctgagctgggcgaatacggtcttgtagcccagaggaacgtagatgaagccgtggtgagcgagagtgctcatcgaggcaagggcagtcgactcttgaccaccaccctgagtaccggtcgacacgaagagaccggcgtacttgccccagaagccaccagtggcccaaatgccaccggtcttgtcccagaaggtcttccactgagccgggaagttaccgtaacgggtagggataccgaacagaacagcgtcgaaggcgaggaggtcagagggctcaacaatgggatagctagccttggtaggagcatgcatcttggccaaaacttcctcgttgagggtctcagcgatcctagagattcaattgttaattaactgactcgaggggcaacaatgatagcatgactgactggaagatctcggcttgaccaccagcggactcgatgcccttcttctcagcctcggccagggcctggatgtggccgtacatggagtactgatcggaaaattagtgagatgggagaggaatgcattgccattggaagacatacatagacgattgcaaccttgggagccattatgacggtttgaggattgtagaatgaacgttgtagagggaaagttgagaaaggaagagcggggaggggaggtaattatgaaggttaacaccctgtcgaggggaatatcctaggtacatcatccaccatattaattaataggcagtttatgtacctctatgattagcgagcgcaacgaagctttgcaacaagttatcagtcatcgatgacagagcaaaatggaacatgattggctgatcaggttccactcggatatagctctggccttagtgattcttactgagaactgacaaatgaagatttacgtgccgagggtgtataactatgcgtagtagagttacgaatctattagtaaaaatgatactccgcaagcgtgcagcttctaccgcagaggggggttgttttagtcaacggaattattaacactaactaatagttcggtctgtctagacagtgcctatcatgatgtcatgtaactaatcgcttctgtgtttaactctatattttggcgtacagagacgtacttgggtccgatggctaaatattaccaccacaaggaatttgggttcacgacactacgggtctatcattgctgcgaaaccagtgtggaatgttcacaccaattatgccattgagctcaagtgaaaagaatgaatttctcgcggatatttttgcgtcagattattcaatagggtatcgcgggactggcgcaagaactcataaatgaaaataaacccaagcagtccgtagaccccttgccgaagccacacctcactccatgccatgcaatgtcaccaaaaaaccccccttgcgataaaaatccatctaacctcttccacgcccgcggaagcggccacgcccaaatccaccgccccgaccacgttcatttcgccattctcgttcccgttctttttcccgttcttgttcttcacggatgagaactcgttcatgctcaagttcttcctctgtcttttcagtacgcattgtaggccgtggtagattttccggccagcgagggtgggcatcggcacacgctttcccatcagggcagaacccggccagatagaatgtacatagacgtcggcggacgtgtcgctttgcacataatggtcccaattcgcaatatccacggtcgtagtgttcgcaaggcggcagtcgtgcctcctctcgaacatgctgataaaggcaatcgtcaccattggtacagtatccagatcgagaaaatgactggcattctggcattcgtcggaggttatattcgtggaggtattcgcatttcagtcctttcttacagagtcccttgaggaaatgtttgcaaaccagcgatccgtgtgttgtagatggcgccattccggaggctgtggtagtcgaggttgtcacacgggacggagtgggatgccgatctggacaggcaggtcctaatggacagtgtccttcactataggctttgcaaacaggtacatcgctggcgagtccgaagccgaagctcttgcgcagaaagggtgtgaaagaaaagtcattgtagctgggatcgcgcgtcggctcggcggataggatttgcgcagctgcgctttcagtttcggcagccatggctcgatgaagatcgagggaagtgttgagattgaagagatgatcagtggtagtcgcgactcgcgagtcaggtgcgtgtattcgattgactatgcccacccgtgtagatgaaattgaacgttcggagggagagtataaatcacagatcctcggggtatctcgctcaaataggcatggagaaggagaatttgaggaagaaggcttagttgttgaaggttgcagagctgtctaggttgttctccagttatcgccttgaaaatcaggtggcgactcggtgtttggctcgtttgcatctcgacatgcgatattcaacaacatcgaaatcatacttattggaaaaggattatgatcagtacatcaataccctcgagtctcgtgctatttgtcttttgactatatacggcaatacactaaaggggggacaaggacgatagaaacagagtgaagattgaaaactatccaatccaatttatttgacagtgaggctgcaactgatatttcgaactatttttattgtcttacccagaatctggatatgtagtatctgtgcacaatgcatacaatctcagggtctgtcgttttcccggctagcaggccgacaatcttttctccgagctttatttgggacattataatatttaacgtatccgagatagttaactagttagttagttagttatgtaaagttgattacatatatccgtttaggattcagtttcagcaagttaatctcacatggctcccttaaattaccttcctagtattaaatagtcccgagactatcgcggctattaaaaaagaacaaatggccaagttaatcaccaggttgcctattctggattttctatgagcttgttgatcatcttcattgcaatgagcgcattcggccatttgaaaatattacttttatctttctcgtaatagccctgtgtatacttcaagatgatttgagacttttctcgtgcaatgtccctagtgaaacggaagcattccagcctcgatcaccgcggggaagtataaagccggggccacatgcatccctccccatgccctagcctcatccttcagactatcccagcgaatcagatacccctgtacccctgtaaacgctgtgattatcaaatcgaaaaagcaaaagttaactagcaaaaggccaaacctacgtcgccccatctccttgttctggttattggcttcgcaacaaaacccctttcaccggggtacccagcacaagctagattcgtattttcacgagtcatgatcgtccacaataatatattgttcatgacgatctgccgtcattgcaaaaactctcgaacacggggtggagtgcattgcctcatgcaggcgatccacgcttgtaccttagtatgaaaatctctttgacaggattttcttgcgtccgctggttagatcggaccgcaggtcatacggacatgaccggacacaatcctcccccatgtgtcttggatctaggacaattcatgactgaactccgagacagaaaccccgcatctgaccatgcaggcatccattgtgtacaagttgacaacgtacttctgtttggaaaatgctgcgcatatgcttagcccacattctccacatctttctgtgtccaattgctgattcggccatctatatggagcctagtcgggttacctgagatttgcatctgcaaactgcctgattatacacttcacctaattagtgcaagtgcaatagagagagtacgaaaaggaacgaggcgaggttccacgtgacgtattcccaaaagggaaacacacagcattgttctggggcccttttcaacttgcaattcaattctttctcttcttttctttttcgttggccttttttggaattccattcagcttcagtgctttgtgtgattccccccaatgcgcgagctctcacacttctcacctcgacgtcttgaaaatgttctcagcttccaggctcttccgccgacggggcgcggatcgtgaccccgctgccgagtcccacgtctcatacgaagtgccactgtacacaaatgcagcctactatccgaattggagaatctatcgaaaggaacctccttcatctttgcgcttgggatttatctcacatgtgttctacgcatttgcctggtaaacacagccaatcaccgccattcaagagtccgggttcgagcagatggctgacgcgctaatctcaaattggtttcttgcagggtgaaagatgacggaactgtctatgtaagttttaagttttaatcacgcacctcctctaatgtgggaatatttactgacgctgcgtcatagctgagcgatgagtgggctgatacccagatgcccgttgacggcgcagaaggttgccttagagctttcgtccaattgaagcaacagtactctaagatgagggtcatcctctctgttggtggtggcggaaaaggcagtgagaacttcgccgctgtagccagcagccattctcgggtggacactttcgttcgcaccgcgcgggaactggtggatcaatttggaattgatggaattgacagtaaggccgcgtatctttttgatgctgagacaagtcggatgtacatgactaactccatctgctatgcagtcgactgggagcacccctctgattccaagcaaggaaaggattatgttcgtctcctcgcacgtctgcgggaagtgctacccgctccgcgttacgtccttaccaccgccctccctgccggccagtgggcattgcggaacattgaccttgctgccgcacaaaaacatcttgacatgatcaacctcatgacgtacgatttcgcgggaccatgggaatccgagacgggccatcaggcgcagctttatggctcaggcatatctggtgattcggcggtttcttatgttatagggcaaggagtgccccctagaaagatcattttgggtgtcccagtttatggacgatccttcctgggcagcaacggtcctggtcagcggtatactggacacggtggcgaagatggtgtttttgactatcgcgacctaccccgaccggggacacaggagtattatgataggaacatcggtgcgtcattctgtgttggagctgatggcggtttcgtcacatacgataccccagaaacagtaaaacagaaggcggaatttgtgacctcgtcgaaactgggtggcctgttttactggcatgtctgctccgatgcccgaggaccgcgtagcttggttgagacgggatacaacacgatgcacgagatgtgagggctttcggctctttgcaaaagcaactaaatcaaaaatcagaatctcccatggcgcgctgacatcctcaaaaatggtataggtagctgtcattattttaacaattgtctcccaggttcttggttacccctagtccatgactatataggcttctagtaggaacggtaaatatagaaaatatcatgtttcagggtataaggtgaatcgtgatacggcgcttttgcgggcagatttagtactttcactttcattagacaaccgacagccgaggtttacgcagtcctataccccagggggccaaacctccatttttagcaaatactgatacattaatgcctggtttgggccgtctccttgaggatagggagaagacatcttagaaaagacacctagaaagacatccaaagaggctatcaagaatactaactaaatttggttagtcgaggctattcttgcaatagtaatacaggtattttgattcttctaccgatcccaattcagatttctaggcctaaatcaaatatcaaggtatgacatctataggactgcgtagccgaggttcatcttccccgcattttcaactgctttatcaaactcactctgcacattctatctgtcatttccccgtcgtattcacttataagaatctcactatgtcctactcgcagcccgcgacagcagatagcggctacatcaccgaccccggcccattggagaatacctacacgtcggatcccagcctccaacggacactggcatgtgagtttttcattcatatgtaattataataataatttctaaacataatccagggtacctatcatccgctgtatttcaatctgtacaaccgcatctcactcagttcggtgccgaggctatttcagaacaggttcgcgaatggagcgccgatgctgagcgcaatgtgccatatgtgaagagccataatgtctggggtaagcgatatgatcatgatcgattggtaaccacggaaggctggaagcaactgggcaaatggggtgctcggaataggtgtgatctataaatcgtatatgacatgcatgatctaacttgatccgattaggatcgtctcggcgggctatgataagggcttaggggtcgatcggcgaacagttcagtatgcgctgtgggtatttccttgtcgatctttctatgctatcgctaatgccatgattccagtacctatttgtactctccttcttctggactctactcctgtccgattagcatgaccgatggtgctgcttttattctctcatcgaaaattgacacgctgccatccacgcatcctttccatgctgcgttccaggggctgatctccgaaaaggatgatcactggacttcgggccagtggatgactgagagagccggtggcagcgacgtccaaaacaccgaaacatgggctacctactcgccgctagctactccttccggctcctccggctccgacctccttggtgatggcgactacctcattagcggattcaagttcttctcttcggcaacggatgccaaccttgctcttttgctcgcgaagactccatctggaaagctaagcacgttcctcgcgccattgcgacggaccgtggtagatacaaacggtgtctctaaagttgtatctaatggcgtcaagatccaccgactaaagaacaaactcggtactaaagaattgccgaccgccgaattggaactaaaggatatgcgtgcgcatcttcttggggagctagaccaggggattgtaacgatcgcgcctcttctcaacgtcacccggcttcatacctttgttggttcgcttgctggttggcgccgagcaatgagcatcacaaagagctttgcaaaagcgagaaccactgtcggcgaaccgctctggctgatcccaatgcatttacgactcttggcggacttggaagtaaagcatcggggtgcaatgaaccttgcgtggttgacggtcgctttgtttggaattgttgaagatcaaaaaccgtcgtctaataagctcgcgcatctccctcaacctggcaaggaagcagaggtggttttccgtaccttgactgccactgctaaggccgttatcagtaagatggccactacgggaattcaagaatgtcaggaatctatgggtggagtcggctatatggacgaggctgacgagcccgagttcaacatctctcggattatgcgcaataacgcagtcaattctatctgggagggtaccacgaacgtgctagccagcgagtttgtccgcttccttatcaagaatgacaacctgaagatatttggaacatggcttaggcgtaccttggccctgattcagagcgcaaatctgcagaatgccctgacagctgcgtggtcagctttgcgtgctcgttttacggctcaagatcccgcctcaactgttgctgatggccgtcgctttatgttcactctggcttggattctatctggtgctcttctggcgcttgatgctgaacgtgataatgaccttgtgacgacagagattgctcgacgctggatcttgagtgctgagggtggcgtgggagagcaggtgttccacgacattgttatagttaggagcactgctagcactatctctgaaggggaggaacatctgcaatgggactgtcgtattgcctggggagttgacctgccggcgaaccgtgcctctggtcatcgatccttgcaaaaggcaagctcgaagctttgaatcatgaaggttgatgccatatatagcacgcaatcttagctggcatttttgacgtttggatttctagctgatattggatcattctacatatgtgaacacgcaatcaacactttgcctgaagactagtagttttcattctttattttggtgaataatgacggatggggggaaaagacgtgctacaaatagaagcatacaagcacgagaatacctagttcgcaagccagctcctgttgatcaggcaagttgaacaataatctactaaatgaagcttccgcttagtactatattccttcagcttcgtgcggggactaggcgtcacatcagccgagtagcagcatcaaccctatgagatgcaccatgcatcgccgatataaccgacttcgaccgatttccaccgacaatcaccgaaagaagctatagtatcatgggtgtctctaggaatgcgtcagatttacccgaacgagacatttcatgcgggggttcaaaagccgggtgccgacgggctattggtgtgattatcgagattatctgctactataaatcactttataagcaatcccaattctacgtcttcaaaatcaaaaatcaacaattgacaccaccacagaaacagacaagaaatggcaagccctacgaagagcgagtcgagcgacgctctcaggcctcgtcccatctgggaacctaccatcccgcaagaccaaatacccatgaatatctatcgtgcgcatatcaacaagaagttcaatcagcagcttcgctcttctcatgatctgcatcaatggtccgttgagaatctgcaagatttctggacagacctccatggctatacgggaattattccaccattgcctccgacagtaacatccgcatttgatcctagcacgccaatggacaaggtacccaaattcttccacggagcaactgtcaactatgcggagaatgttgtgtctggtcgggacttggacaagacggctcttgttggagttcgagagggccatgatctgagtggggaggtgtggacatggggagtgttgagggagaatgtcagaaaggcaaggagtgctttgctcaagctcggtgttaaagaacaagatagggttgctgctgtcatctcgaatagcgtctggtcggtcggtttgttcctggcgactgcgagtatcggcgcgatttggactagtattgcaccggatttgggtgaagaggtatgtctcgcaggaatgggaattgctgtcgacatcggagactgattagaaatactagggctgtgtgtcacggttacaacaagtcactccacgggttctcttcgcagatgccgaatccacatataaggggaaaatgcgatcgaacgtcgtcaagatcaaaagcatcgtgaaggcattgcactcaaagccacaggtgtttttgattcctatcatcggcgcccatgagtcggcattccccagtctcgatcgcttcttgtcaatgtcacggcgagaggacaggctagggttcaaaagagtgtccttctctcatccactctatatcctatacaccagcggcaccaccggtcagccaaagtgcctggtgcacagccatggcgttattttgcagcacaagaagacatccgtactgcacaactctttgacatccgaggatgttgttttccagtatagtagtacctcatgggtcttgtggaatgtcatggtcggtcacctctccgtaggtccgactctgattctgtacgacggatctccgttatggcccagtgccaaaggactggcaaagattgcggggtaccataaggtctcatactggggttgctcccctcgctatctacaggagctcgagatgaccggttgtatcccaaagaacgaattcgatctatcctccctcagaatggtgcagacaggtggctctcatctgggtgaagaccaataccactggttctaccgcacattcccttccagtgttcatctcaccagtgtaacaggcgccacggacttggcgacttcttggattggaactgaccctgcaggtccactgtatcctggggagatccagcttcctatgcttgggcacgacttggacattgctcatcctctcacgggagcttctatcaagaacactggaagacatggcgagttcgtctgtcgcaaaccatttccatcaatgccagtctttttctggggcgatgaagatggatcgaaatacaagagcgcctatttcgagaaatttgagaattgttgggctcaacacgattgggcgagttataacccgcaaacaaaaggttggcagattcatggaaggaggtacgttttatttctctgtcggaataaatttggggaaagtgcgtgctgactgggaaaccgacagcgatggtgtccttaatccacagggtattcgttttgggtcttcagatatatactcgatcaccgaatcagctcctttcaactcggtcatttcaaccactttctgtgtcgggcgtcgacgatctcacgactctgatgaagttgtgtttttgtttgtcgtgatgcagtctggaaagccgttcacgggccaacttgctgtagagctcaaggatgcaattcgcaaaggcttgagcagtaagcatgttcctcgcttcgtgatcgaggtcaaagaagtccctatgacggtcaatggtaaaaaggtggagacattgataaagcaggtcatttcatctggccagcttcctaagattattagcagcaccgttgcgaatcctaggtctctagatcacttcaggcagtattatgatcttgaggtccaaaacaacaacagaagcaagctatagacgacatgctgtctagcctatacaatagacaatgggtggtattttgaaagagaaatgagaaaggaacttttgtacatgaaaagaaaacaagacatacaccgagaccgatttatgtatcgccaattctcgagctttgtcaagttcatgtattgagtagccaggagccactccagtcaaatccagacccttcccaattattgctgaatgggtccaagccaacatcaacagaggcaaagtcgtaagtatccacaggttgtcccggcggagcgtcaagggaccgaagggcatcattgggggtttgaatatccgccatagtgcaggtaggcgagatgtccgcatccccacttggggactctgaggagtgtccaatgatttgccattgtttgcaaagttttgtatcgaatccctcaaagaaagaggctgcgtccaggtcgagagtaggcgatacacccccaaagggacccagctctcggactttctcggtcaagttgttcagtgcacgcaatggtccgaccgccgagagccacctttcggatagcttttgaagggagagcttcatgactgttaattcatgttcggcagtattctgcaggtgggtatagcgacagctagaaaggagtgacagtccagcacatagtggatagaaagcaaagacagggcccaggtatcgaagctcatcgcgaagcaggaattcctcgtaaattccagcaataaacgaagatgctaccagcgatgctgcgggtggaacgctgcctggcgtaggcgagcgatggagaatagtgagcactacgaaatacatgaccagcacttgttggatttcgaaattgcaagtaaccgcattgtcttgaggtgtcacacatgatcgtaatcttggaatgacttgttttgcccatcggtagacggcgttctcgagatcgacctgcctttggcgggagatttcttgtcgtagatgggactcgaccgtgtctcccagaagccgggatatcgtgcagtaggctaggaatagttgtgatttgaagttgttcacggggaaatcattaagtgatggcggaaggacatcgctgtcgcgtagattgatagttcgtggtcggccgacgccaacagaaattatgttgtctcgtacctaagtatgttagcccatattattccatgtgttgcagattcagggggagacacctacaacgagagaccaccacagccttctccggagaccccgatctcgggaatttggcgagggctccttgtgtagcccaatctgaaacgccattgctccagctgttcgaatccaaaacccactggtatcggtagaaacatcctcgggcccaaccggattgtaccaatgcagtaggcaggctgccacaatagaaatcaaagggtcgtcacaaccaccaaaaaagaaaagtagttttgctcgtcgatagaacacttcgctggacccatagtcgagatgagctttggaaactctacttccagcgaggaagacagactggagaagcagcattgatcgcggcgcactctcatccagccatttcgggtccacaaccggtgtccaggatgcacagtgcatgttaaagctggccattagttctgtttggactgagactggaggtaactcaaaagcaccctgattgcggagcattttcaagtcagttgctgatgctttggggctggtgtatgtggtttcgcgaccaggtttgaccatattttcatcaaacgggacgctgccgccgatatattcactgcggccgcgatagctctcctctttaataaaaggctcgccattattagcgatcacggctgtattggtttcaattggaattgcctcatgagactcgctcaaataattccgctgtgaagctacttgtgcctccggtgactcgggaggaacctgtgagctccgtggtgtctgactcaagggagcagacgttgacacattccgccctggtgataggctgttggtgaacctcttgcgctttcttgtatatggtctgaaggaagtcaattattttgattattcgacttcttttgaccgggtctacttacctgcactccacatccgactttttgcagttggtgcaggggtcgtgcgtcgcaaagtcgcacctcacctataaccgttagcaattattcgggaatagcccaatagatgatcaatgacacacctttctcttatggcatattatacatgctgtagacatggcgctattaccgacagcgtagatccggatgacgatgatggttggaggtcgagggcggggtttagccgaggcatggaaggtctataaaatgctcaacagcaacatttctgtctttttttcccactaaaagtcccctgtttttagacatggcggaacccggcagagttacaacagatacttcctcgtatcctggcatctcggtggtggcaatcaatcgccctgataggaagaatgccgtcgaccccttgacagcgaaggcgctttacgaagccattcttctttttgaaaatgacgcgaaacaaaaagtatgtgtcctaacgggtgccggcggtagcttttgtgcaggagccgacctccatatggttgcacaggcaaacaacgacacaccgagcgacaacctccaacctgtcaacggtcgcaacttagggccaatgggtccctccagactcattataaaaaaaccagtcatatgcgctgtctctggatatgccgttgcaggaggcctagagctgagcctactcgcggatatgcgtgtcgttgaagaagacgcagtcttcggggtcttttgtcgacgctggggtgttcctctaattgatggaggaaccgtccggctgcaagccattgtcgggcttggtcgtgccttggatatgatattgaccggtcgggctgtgagcgcccaggaagcgctgaccatgggactggccagccgggtggttcctaaaggagaatcattaaaagaagctattgggatagcaagacagctcatcacattccctgagttgtgtctcaacacagatcgccattcttgctactacagtgcgtatgaggcatcctcgttccaggatgcgatgacccaggagttcaatgcagggagcaaggtgatttcacaggaagccatagcaggtgcagcgaagttcagcaaaggattagggcggcatggcagcttcaaggatcacagcaagctgtgaagagaaagaggcttccattgaacgttgaaatagttcacattatcaaattaatattttggatatctaaaaccaattatcactggtggcggcagtgatgtgagagcttattatgctaatacaagctagacatgtatgttcagaaatatgccgtattgcgcgaatatagagggactgcacgacgaagtccctagttgattttcttttcggtttcgctcaagtcctccgaggtgaatttgacacgcttgccgtaaaccaatggagtacgagaaagcaaggagccaatggcatatccgatgtaggctccaacaagaatcgtaattgggaatgcctgccaaggtcggtcccttcatataccgagttagccaggtattccgcatttgaagtgcagtatgaacgtatacataccagtcaagaggaataggaatagcgccaaaccacgcccccaagcctgtaccgagcgcactgccccagaccgcatcagcgggtcgggcaatgccccaaacctcgttccatacgccgcggtccaacccgtgggcgtagatcagggccgtcgcggatagaacggccatgtgggccgcacacaggatggtctcggaattgtgggttgtgagcggggcgccgaatagaaccaggaggattgtcagaaccggggtggccaagacgaaggtcagggagaccgagaggagggccggctagaaaatcgtgttagtatcaatcacacgcaggttccgcttaattggagagatatcgcgtaccagtgaccgagaccaaatgcatgcccagctattggcgtgctgcttccgctttccatgtttgccatgtcgcgcggcaccaccaggcccagatggccgaggacttgacttcacatcagtcggggcggacgcgctcgtctctgttgatgtcgacccagcgggcggaagacatacaatcacgtagaagatttgtataagggtgagccatggtagggtggaaagaagctccttagtaggattagccaccaatgcttcgaaacgagtggcacccaatgccaaaaggagtgccggatgcgcaattgagtagatccgggctatcaacgaggggaggatgttgacgggaggggcggaaggtttctcgacgagcgtctggggtgttgaggaaggagcccctagcgcggaagaggtgtcttggggcattgctgggttcaactggcagttctctgtggaaaacagaccttgagaagctcccggttgattcagggtggaaatcggagggtcttgaatggagatgacagctcgatagtgattggctgtggccttgatgtcttaggcagaacatatatcttgccttgcccttcaggcaacaacttcatttccgagttcacaaatggattgtactacggagtaatatataactatgcagtccatgggattgtagcggccctcattacaagctcatggctgacatattattcgttgggcttcttatcattgtgaaaatgtatacagctgtctcgcattgtgttcttctcttttatctccagtataacaacatgctagcaagccagaaagacaagtcgcctacctacaaaaccgcctccagtctcagaggaaacaaagctgcactcatgaagtcgccccactttctatctcaccgattggactaacatggtgagctatcgatgggtgttgtacttttgagtatgaacatggttgcactgtgtctacctaaatgcatccagcaagtatatataagcgccccagatagatccgattaagaacacacaagaaaggcaattgcttcgttctcgatgaattttgagccgataaataccatcgggattggatataacctgacgaattcttcaggatttctccggcgcggcacttcggccgcagacacactacagctatgcagaagtgcgaaataattgaaaagcaacatccctatttttgtcatcgggttcataacagtataacagaccgatatcgcaagttcaacctaagaataggacgagatcgaaaaaaaaaaaacaagaaaagagaccaagacagaccggctgcaattgcagagacagacatacattcattccacatggcaacgtgatcaactgaaatccggaaacgggctaataatatgaaaagagcttcggaccattgcaggaaggcgggggtaggtgagagcaatgggataaagaatacatgagggtcgttcaaagggaacttgggttggcaccacaccacccaatcgagagcaagggggatggaagtgcaagagggtcacgaatacgagggcaaagcccattcatcacaaacgaagataaaagacgagaaaacaatatcatccaacgcctcgggcgtcaatgctccgtgaataagccatacccttttaaatggtcaaacaaaacccgcacaactggataaaagatagaggtgcaagccgtggaagagcaatcatgaaagcagtcatgaaaatgatgggagcgaggagtggaaacactgtgcgagagcactttgaagtagatcaagcagccgaagtggacggtcctgcgatctcttccaagatctcattagacaatggtggctctggtgcggacacggactcggtagctggcagctgagcggaccccttctgttcaatgacaggtacagacgcagatgctgcggggctatgcggctcttcgggaatagatggaggaagaccagcgccaggcaatggagacacaggcgaacgtatatgctcttccttgggctgttcacgtgggacttcgaccgaggcatgattgccatttgtcgactccgtagcatttggagaaagaggtcggttggtgagggacggctcgttctctgaccgggtggggctttttgtgcgctcgcgatcatccttaacaccatcccgaacttgagcaactttcgccttgaactttccaaacaggctctttttctcgggctctgatcctgcggaagaggtgccttgaacgccagcatccaagctcaatgggtggttggagaggtcagtgctttgatattgaccgctgccgattgaagtggtgctttgctcggctcgaggatttgttgctcctaggggtggagacgcgaaacctagtccaagttgctcgctggtgcgcttcggagaccgatgaaatcgccaacttcgacgattttcatggcgagtgacatcatcgggctgatccatatcggactgatcagtaaaagatgagcgtgagttcatagagggcgtacgcgacttgttaggtcgcagagagtggtcagtgtgatgttgcaaagtaccctctacgagagccgagttcgagtcaaaggggttctcccggttgccgagtgtcgcagcatttggaggtttcggagtggtgtcaccaacagcagcttccacggaccggttttcgtgtttaggttcaagatccgcactgtgagctggagtcgaggcatggagtgaattagtcgagctttgtgcgctcatgcttgcgctaccgggaatgcgcttcttcttcaagcgattcggctgccgatgttctctcagttcatagtcaggtggcggtgacttcgtgaagaaacttgaaagcttacgctcacgactcggagtgacaacctgtgggggtaaagtgaccgggggtgagacgaccgtgttgagattatcatgtggcctggtagtttcgttgatgacaagacgttcagcagttgccaggggcaatgggccatgggttgacgtgtgcacatatacgttgcctggagtcaatgatgcggttgattgactagggatgcgctgctcaggacgctgctcggaggtctgttcagggactggccgaggaaccggatgagatacagactcagggatcggctcaggctgctcaggctcttcgcgcactgatggcgttcgactattcgatcgagaactttgatgagaaacagagaggccggaagggttgttcgagccagtgtcattggctcgtgcataacgagcagaggtcaaaacggggcccatctttgagggtagggtgttgcttcggtgcacaccaccgccaccaccgccagtgattgaggtgggagttacagggctttgagtgttgttagaatggcgggagttgcgcgacgaaacggagacatttcgacggatactgtccaacttgcgatggctttccgtgttcgcactagcgttggataccgatcgtcgaacggtggggtgaggtcgtgcaatccctgcctcaacctccttcacagtctgctcatcggcagccgtgccgctcattccgaacaggaagtggtcctggttctcaatcaagaagatcaacacatcctgacttaacttgtattcctccggcgacatatcatgctgcgggtgggacagcatgcctggttggaagatcgcggacagattagctgacggcatgcgattctgatcggactttgaggcgaaaaccgcgagaagatcgaggatatagaggaggagctgcttgttcaatgggggcagctcgatgatgaggttctggtatgtcgaaacagcctttgcgtggtcgaacttatcggcgtcggttgtgttcttgccttctaggacctgtcgttggtagatccgcagaggttcacggaagcgctcataaaactccaatggtacgatgggttcggggagctggttcaggtatcggcgaagtacgtttgctgcatcgtggacggtgtatccggaccaatcgagtcctttgccatatcgctcgggggaatcaaagacctcctggaggtccttaatacgcttggctgatccgttaagacgaaaaatgccttccacatccgttgctatccaaaaacgtcagcgttaactcatcgagtacagcaaggtaaatgcgaacctttttcttttagaaacactccacactttgcaacaacaatcggcacgtatccataaatgaagctctcgccgtggtcgttggtcaaggagattgccacattggcatacttgatgctgacattgagcgcaatcccgaagatgccgcggggtgcctcctctgcgataaacgggtcagcgtaccagttcaagaaacgataaagaacctaaacaaatcaattggaaagcgagcaaagtccccagctccgacatgttgaactgcaacaaccatctcctgtgcgacgaggggagtataccccgaggctcagggggattgcgaaccgccgcgagccggagtagctcaggaaatatttacgcgattgcctgtattctgatatcgcattcacctgatatggcttacctttcaattcatcttttctggtgctccgtttgaactgcttccaccatgaagctaaatctcgctttgatggtggggagttggcgctgaccggatcgggtgaggtggggagagggtgaacggggtcagcacccgggtgcgacttgccgaccgtcaccatggcgagtccggaggacgactcgagatagaagcgaagatactgggaagcgaaaaagcgcaaagaggtgggtgtgtcgatcgagggattcgggaaagttgaaggggccctgcgtcaccgccctcgtgtgggaaatcctggggctgggcccaaaatagcacaggcacgttaccgaggcgaagcagaacagagatgggatttgagaataagaacctgagaacaaaggagttgagaagaaaagtaataggggatgtgagtatgtaagtctgatggatgaagggatgcgaaagggctaagaggtcagggtttcgaaagggtcaatgggggggcacgagccaagagccgaacacatatgacagagtttattctctgtattttaatgacagggacttactgatcagggggattttcattctttttgcgaacataagactatgaatagcacaatctaaccaaggttcccgggacaagttaaagatgggtcagggtcacctgtcatatagaattggatcattgtatggagtgcaggtacgcaatattctagggatttggaattctctgtcatttgctacatagaaacaccccgatggagtaaaatacagatctcccaatactagcttattgtagaatttctagaatttctagaattacgagcataaatgtgaagagccggccccgcctgcgagtagtctggaaccaacgggtcttggattgtctggaacgtgtctggaccctttcaggaataattttactggagatcagtcgcttatatcgggtttcatattttccggaccaggtaccgattttcatttttttctagtttttcaactcgcttgaccttttgagttagcgtgaccaataaagtcgacggagtatacatttagagcatatccattgtcacttgatctatggaaatggtggcttaggtacagggtacgaggcatcatatttacccttgggtctgtgcattatttccatcctatttttcagagatcgtttcagaatgcatgctctaggtacatgtagtttttgatatcttatacgtcatctggatcaccgaaaagtgtaaataacacgattaaaccagataatctttccggcctttggttgtatctttctatctatggctcaccccttggactagtcataagtcattgaggtgggattggctgtccatagcgtcatgaagtgaggttggaatatcggtgacgttgagatatcacgtggactgtaacatcgaggtttttggcatatttatccgatcggagaaactatcctgcgggacagtaggtagaaccgtagagctaacaaagcatcatgacaatacaccgatctagctggtacaatttctatgaagattgatctcccacaggcctggattttaggtaaactgtaaaattgctgaagtgaaggccctatgggctagacaactaccaagagaggagatgttgattaattgatggcctagtagctaaggcataacattttgagtcgcgtgggctattatttatccggcacccgagaagctcagaaccagcggagctgacagctaacagaatgacttgttgaaagcatcttaccatcaaaacatcttgatcttattcatctatcacaatggaagggtaagtacaccctttgaaccctctttaatttttttgctatgttttctatcccattgttcctgagggtcatcctatgagcaagccactaatactcaagtcacagacttaacgcagcggaacagcgcgagttcgcctcccgcatggagcggaagcagatgaaggagttcatgactgtatgtatctcctagcttcattgttcaagattcaagttcttattcctctgcccatgttcctccttgccatcaaccacctgtgttctcccacgctcaagatctaacatcttctctttcagatgtactccaagatggtccagcgctgctttgatgactgtgtcaacgacttcaccaccaagtccctcatcaaccgcgaggagacctgcatcatgcgctgtgtcgacaagaacctcaagagctccgcccggttgaacgagcgcttccaggagcagaatgctgccatgatgcagagcggctccatgggaggaaactaagagtctattttgataataagaaacatattgtcgatgactattctttatttttggcaacatgcattcgacaaattgggtggttggcgatgcggctcgatcgacccggttgtctccggcccgacagtggctttatctggaggtttagagggatgataacatggtcgatgacctgttggcggggaagcgaacaagatctgctcctttccgtgtacaatagtgattagcacgggagatatctaactctcctctcccggggctcaaaatacaaaagacttgaccaaataagggaaatgagatgtacgtgaccgggctcgcaaatcagagctcagcttggattatatttgtcttctcaaactcgagatagatcctttgttgctatcaaagcaatgcaatttaggcttgtgaagcccgagggtgcgtattttcttgtttattcattttccttggcgtacacattcgatgttccagtaaaactccgattccatgctataaaccgcgttgccggatggtgaataccactattctgcgactaatgcggtcggagtcgtaccgtgagaggtaatactattatatacgtatagtgcatccggacatacagggtaggatgtatacaccttccttttcccgcggagctcgggagcattcccgatcacgcgtttttctattcggaaatgccttatcgtactgcatttccccaagtgaggagaaacatatgaggggacttggaagctgtccggatctccaacttctcaaatatttgatgctttatctttcccctcattcccggatccaccccccactccttcaaaagcccgtcatttcctcttctcttcttccaccaccgtcgtattcttgatgtgagtcctttttttcccccttggcattcctgtaattgctaacagtattcgcgttagaaatcaataagcacaatggccagtacagtaggaaaggtaaattactttttccttcttctttttaactgaataaccttgctaactcggaaatctacagacaatcacttgcaaggtaagctcgatccgaccgccccgcatatatgacgtcgaccagcacagctcgaatctgtgagtcatgaatattgctgaacaaattgacaggctgccatcgcctgggaagccggtgcgcctctgtccgttgaggatatcgaggtcgctccccccaaggctggtgaggtgcgcattaaaatccaccacactggtgtctgccataccggtaagccccgccatcaaccccgccctataaaataaattgccgaaaaaaatccgatctatcagagccatgattattgacatccctcagatgcctacactctctccggcaaggacccagagggtgctttccccgttgttctcggtcatgagggcgccggtattgtcgagtctattggcgagggtgtgacctccgtcaaggtgggcgactacgttgtcgctctctagtacgttttcggctccgatctcggcgttacggtccactgacaattgtagcacccctgaatgccgcgagtgcaagttctgcaagtctggcaagacgaacctctgtggtaaaatccgtgctacccagggtaagggtgttatgccggatggtacctcccgtttcaaggcccgcggcaaggacctcctgcacttcatgggcacctccaccttctcccagtacaccgtcgtggccgatatctcggtcgtcgcggtcactcctaagatccctactgatcggtcctgtctgctcggctgcggtatcaccaccggttacggtgctgctgtcgtgactgccaaggtcgaggagggctgcaatgtcgctgtcttcggtgtcggctgtgttggtctgtcggttgtgcagggtgcggtcaagaacaaggccggtatgatcattgctgttgatgtcaatgatggaaaagaggcctgggctcgcaagttcggcgctacccacttcgttaaccccactaagctctccggcaagaccattcaggagcacctgattgagatgactgatggtggctgtgattataccttcgactgtactggtaacgtcggggtcatgcgcgctgctctcgaggcctgccacaagggctggggtgagagcattatcatcggtgttgctgctgctggtcaggagatctccactcggcgtaagttcccccccgctattcttcaccccccagtgtatattctcctggtctaacacatgccacagcattccaactcgtcacaggccgtgtctggaggggatgtgcctttggtggtatcaagggtcgtacacaactgcccggtctcgtcgacgactacctcaacggcgagctcaaggtggacgagttcatcactcaccgccaatcattggatggtattaacgccgctttcgatcagatgaaggagggtgactgtgtccgttgcgtcgtcgacatgcaataaggacaatagtttgccaatcgatgaaaaataactgatgtgaaatatgaatttaattatttcttagatttgggtctttttaaacaagagtaagagtacaatatacgggggagcttggaactttgtatggctgaggttgtcatcaaggtcctcaaccccgcggcaccttgagggtgacctactgatgtcagctctatggatttctatatccctagatctgtcaaagaaacaaattgtagggctataatgtcaacaccgtggtaagtaaactgataactgattcaaaccgcataatcatagcataacaaagtcccagcgcatcaggctggcggtcgttgatttttgagaccttcctctctctgtttcttctatttcctctcttcgggtagatctcaaagccttgcaaatacgaaaccgtctcttgacctagatcaaagccgcgggacagagtcaaacatacctaccgcgcggtttatacttctgctagcgagagtcggaaccccaccatgtctgcaccaacgagctatggatgaagacgccaatctcggttctacttcggtataacatagctggtggcctatgataggtggtatattgactgaatatagcgccattcatgtgctgacgagtctaggaggggctgtcttctgttatcagaccctaggcccaaccccgttcgccgcggcgatgcccgcggcgatatctgggaggggtatatagtccacaatatatcagggtgtactgaatcaaactgtttcagtccttctctacattcggtctatcacttctgctttgcctgtcttatactggagaacaagtctcttcaccaccaccactactacaaccatacaaccataccaccacactccaaaacaccgtgcaatccccaaaaatgacagatccaaacccagtcaccctaccagcccccttctccacaatcccccgaacccccctcctgctaggcccctcaccaatccaccccctcccccgcataaccgcggatctcgccaaaaacaacccccacccactcgtaaccatctacgccaaacgcgacgacctaaactccgcgtacgcctacggtggtaacaaaacccgcaaactggagtacctgctggccgacgcccaagcccaaggctgcacgacgctagtctccatcggtggcgtgcagagcaaccacacgcgccaagtggccgcggtagccgcgcgctccgggctcaaagcccgtctcgtgcaggagcactgggtcgactggacggacccgggctacgagagcacgggcaacatccagctgtcgcggctgatgggcgcggatgtgcggctcgacccgtccgggttcggcatcgagcacaagaacaccgcgcaggcggttgtggagcaggcgaaggcggatggggaaaagccttactatatccctgctggtgcgtcggaccacccccttggtggacttgggtttgcgcggtgggcgttcgaggttcggcagcaggaggtggagatgggggttttctttgatacggtgcttgtgtgtgctgtcactgggtcgacttttgctggcatgattgctgggtttaagttgttggagaggttgtatcctggggatgcgaagaggaaggttattgggattgatgcttcggcgacagttgaggcgactcgggcgcaggttttgcgcattgcgaagaatacggctgcgaagattgggcttagtgccgatgatattacggaggatgatgttatccttgatgatcggtaccatgctggtatctacggtattcctgatcgtcagacttgggatgcgattgagtatgcggcgaagatggaggcgtttattactgacccggtctatgaaggcaagagctttgcgggtatgatagatatgatccgtcgtggggagatcaagggtggaaatattttgtatgcgcaccttggtggacagttggccttgaatgcttactccgaccttggtcgggttaatgaatagaccaacgaatcaagagatcaatatgcttaactagagaatgaaaatgttacataaatctacggctttttgaataactaggaagtatagttgtagcattgtagcttgtattatttcaaacgagtgactatagttggcgcgtaaagatgatcaaactagggaagcatggacgacgtcctagaacagcttgtgctcaagggtcatatcggactctggctggagaccaacgcaggcacggaagatgttaatcaaagcggagcgctgcttgcccagggcattgatgacaggggtgccgggaggggtcaggggagccttgagcatgtaactgagaatgctcaggacgctgtggaagcccttgtagtcttcaccctcgctgtcggattgccagctgatacgggtcatcatctcggcgagcacaaccagatcgatgatcaggggcgaagccagaagcgagtcctcacaaatgttgaacaagctgatggtctggtggccacccatgaagatctcagcgtagtactcatccagagcacgcttgttgtcgccgacagcaggcatgtacttgatgacgacagtgtggtcggggtgctcatccttctcatagagaacgtggttggccgcgaccatgtcatccacaacgttggacttggagatctccttagagcggaactgcttctgggagctcaggttcttgccgtcgttgttgcccaagtggttgtagctggcaatggaggtaagcttgataccagcgttgatcaggaagtcaacgagagccgacttcatcttggtctggccagacttgaagtcatcaccgccaatgaaagcacgacgctgctcggccaactgaagggcaccagggacaaaggtgttctggggcgagccgttgatgaacggagtgtcctcgagaatcgcggccacagcaaacacggtggaaggagcaacctccagatgaccggccttgatggagtttatcaggttgtcggcagtgtcgttgacaccgggaatgatgtcggcgtaccgctcagtgttggcagtccacatgataatcaccttatccaagccgttcttagccttgaagtcgcgaatatccttctggatctgctcgacgtgagcccagcaagccttgtcgccctcgatgacattgtcggcacggtcttcctggttggcagcgataaagtcggggtagtagatactaggcagcggcttcatctcggccatctccttgcggacctggttcttgagggtgggctccagcacctgagcacggtccatggactcggcgagattgaggctgctgatatcccaaccgccaatggtcaggtcgttagggtggaccatggggagcaggtcgtggaaggggatgttgatctcctcgccggtcttagcatcagagcccaacttgacagtggagctcatgacgatagaaccgtagtagttggaggtctgcttgccatcgcgggtctcccaggagatattacgacggttggccaagataccagcagttacggtggaaccgttgtttccaccccaaccgaccagcatcatacccaccttgccaaccttgcggttgaccttgaagttgtagttggtggccttgggagtggcaaccaacttgttgtccgcggtgcgggtgatctcagtagtctgataggcgtacttcgacttgatctcgtcttcggtatagacgacattgggggactggacagtaaagagggaagattcttggcgaaccgacccgttcagcgcgccattggcagcatccgagctagcgtgaggggccattgcgttcacagcgggatgaataggcgaattgatagtagtgtgtgtgatagcgtagccttaacggatatagggtgcgcagtccgatgctcctccacggttggatgagcgtcggccgttgaacgggtggtgccgcctgaagaagcagttagcaattgcatttctggatgacgattgcctcctcctagaggcaacagggacactcacgagttaagacttgtcgcgaaaattgtggcggttgtatgtgaccactgtctcgacgagaagtgatctgacctgctgacaaggtttatacgaacctaaggtaaacggacaagaataattgaggatagagagagaagaggaaggggaggaagagagaagaagaggaagtggcatgatggtgactttatgtgtctccgcctgtctccgggaccttgtcccgtcccccggcttccccctttttctttttttccccttttagctccagagcttctcgttggcgattgatcttcttattggttatatctcaccgtctattcgaaagaagtcattgtcaagccgataccgcagtgatggccttttcgatgttcccgactacaacaccacttctttgtcctctaaggtactaaccttctcgggtccatagttacattatgatcagcaacttattcataaatctccagtttttttgtgctgacagctactggggctcccgaggtccgcttccggcctcgggcttctgcctggccgagggatttatttccaaatacgaatttcggtgacgtgattcagtctaggttgtacattttgtgataactgtatttgaattctcaatacaacgcaagcattgcattgcaattgcacttgaggttataacataccggggtatacgtcaggccacgagccctcggctgaaccgtgctgcacatctgcactgcacatcggaggggtcgactccgcggggcagaatagcggtcagccatacgctcaaccttggaacgttgcttggcattggattttgcttcattggaagttttatttttcttgatagctgatcattcacttcatattatatgtggattatcctggactcagaaaggaattgcgcaggatagagagtaaatggttgccgagcacaggttgggagacatagccctgattaacctaggtagacctataaccttacctagaactttaggatattgtcagataaacttacccctttttgtggtcctttggaataattagttattcacatcctacgctgaactttaggcaaacattcctaattgaatgcttaactataggcttctaaatccacaccgcctttgtgctaaactcacatagtagcaagacagcagagcaggtacctacaatttgtatgggtgtccaactttattatctcgaggacggagtacggagtagaatccgccacgataatggatctcgagatgttatcagagccccacagcagcaataccttcgaaatttcaacccgtctacttctatcagcctccctcacaatgaccgtcaaagcttgtgtcacaccaggatgtgccaaaactggcatttgggcctgcgcaggatgtgagccacccaacctaaagcctggcactgcggcagagagtgccagaaggccgacttcaaaggccacaagctcagctgtggtcctacaattccataccactgcttcctgatcagtctaatgcggcctacattgagccattccacctcaactcttaccgaaattggggcctcgaaatgaaggagctcaaggaaaggcttggctggccgcaggctgatgaggctggaaaactctatcccgagaagaacattgatacttggtactactacatgtatcaatcggccggtttcaacctccccaagaacaagcttgccagtcaatgcctgggacgaaccgtgaagggcgatgtagctgtcgtcagatcctcgccggatgatgtcgatggttacgacgagtccttttccaaaatggatttggtaaggaccatcgattactacaagactgcaaactctcgccaggtgttccagcaacgagaacactcgcgacttccgcgcaaaatggggatgccaggggacttttgaaaggggttccccatttcaactcctagggtcaccgaccttagcaatgttgtgtccactgtctggtcgtgtcgcttcccatgtatacttgtatcatttgtctttttgtcttgctaaactgtgttgttgctgctttatgtctccgttgttattgaacgggcgtctcaaaagtcttttactgcgaaaacatattccggccttctttgaaacaaatcttgtctgcagttcatgaagatatccatattgctgttatttctggttgaccaagtattcctgtaaatcccactcccgtttctattacaaaatatcacaaatcgattatgcagggtactgtggtgccctatatgcagcaggtggtttcttggggaccatcatctacattgggctggctgatgtgcttgggcgtcggcgaagtatcatactcacttcagtgacgcaaaatgatcggggctttcctcatggctagttcttttcccctttcccagttggtagtatcacgagttatcctaggtctaggcactggtggtcaactagctactatgcctctgacaatcggaagtattactagctagcacgcgtggtgcccgagtcaccccgttggctggtccggcagggccatgctgcacggaaggtattggcagctctgagggcaaactcgaatgtactatgcatcgatataaaagccagccttcgccaccgttacttgcatggtgaaagcattattatggcatcaagctcatatgaaccgcaaagacgtgacgttttttacatttgggctcgtgagtatatattggcgttgggcaaaatttcctaatactactttcggaaccaggtccttcgcaaaatacttatgtaggtacttatggagttataaattagccctattttcgataagatctcgagaagtgtcactgtcgatattgtggcaccgaattaaatccccgcagtggggaacttccccgaagttgtgaaaaaattcaacatctccatcatgcccggtgcgaagaacacccaatgctggtaagccgcctaaatgaccatagcgctttggagacttgacactgacaatatttagcgatccatgtcgtgtacttcatcataaatgtgatactaccatcccacccccgggaaccagctctctaactgtcataggcgacggcatcttgccgcaatgcagccgatgcattcgcacaggtcgggaatgcgctcgaagtaaaaaagagacgaagttccgacaggcaaagggtcggacaacgcgtactaagtttcctagcaaccaagtttggcttcggccaccacctagaggttagattccatccgatttccttgagatctagtctgacattcgaccgttatttagttgactttgtactagaaaacggaagtggccaggtggataactcgactcaaacgacgctaaatgtgctgtcacctgggaatttgcatagtcatgctgactctattcctaaaccggaaaggctgtctcccgggtcctcatataccgcccctttgccgcaacatgattccccaaactatgaagtatatacgaggagtagtgctatctcgccaacactgcaggtggtgagcacacccgaacgatcacaccggcggccatggcccttgagagatcccgaggaagcgcggctgttgcggcattttgttgaaaaggttgcaccgttcgtaagtgatgatattttgttctgtatggtgagcggcattctgactataatatcaagtttgattgcacggatcgccagcagcattttgccatccatatcccttaccgagcacgccgttgcgagacgttatttaatgcaatattggccatgtcagctcgtcatttgaatcgcacaacagggtttgacccttttgtgtcggataattactatcaagcatgcctggagaagttaattcccgcgctggatgaccacggtgttacgatggatgatgatttattggctgctactgtaatcctacgcttgctggaagagtttgatggtgggtagtggatcccttcgcacatgtgtcaagaagccagttaacgatgatcatagtaccactcgcggggtccgatattcgaggccactccttcgggacaaaggctttcatacggtgtccatcaatgatgactacaaccccgagtctccggcaggctgtctactggagtggcctacgccaggagatatacaattcccttagcctccatcaggccccagacattgatttgaggtcctttgatttgaatttccactctaactcgctgggctctgatgcaggtgattgcgcatgggcgaatcaagcaatcactcattgtgcccacgttctggtattttgttttgggaagggacctcgctcagcggctgtgcatgcagagcttacggcacataatcagcaatggagtgagactcgaccgaactctttcgacccctatttcgtgggtgaagatgtggtggtgggaactgaattccccgatattcgttacagttgtccctggcacggtacgtatcggcgatatatcttggaaaccgttcgagatatgaaccgaggctgatcgcttgtgatgatagcaatcggcaatcaatatatcgatcttgcccagattctgctttctgtgcatgacccaactctgccaacagttggacctctgcgcagaggcctgatacaggaggctgatgtaagtgtcccagtaacccgtggaccttccaatctactttcaatactcaagcggagactgacaggtggttcaggatcatatccgtaggggggtttggacattatgtggcgcttcattatccaatgcctctgtacccccagccatggttgtcggttgtatggccatccatctctgtaagcatccgaaactattttcaacatcttctagtaagtataaacgaggctgaccaatatcacaggcggcgatcgtttcacggacccacatgaacaggaccacttgatccaggttcttatccaaacggatacacttcatggttggccaacccatgccctccagggacagctttgggacacctggggcaagcgatgaaagcgagataggcgctagtgtaggtacgctaagctacatatatgtacatgttgttatggttcctattaaaatacccgggcttggcgcgttaattcttgcaactacctaaatggtagcagcgtaaccaacaaggtacgtatgttgtatgttgtatgaaatatggaatacgtatttctacttttggccaagttcagggtcttgcatgatccgtggcgttgagtgggaagtagtggccagtaataggagcgggctcggatggaagaaaaaagggccccgcggatcgccgaaaaccacaaattgattcttttccttgccgtcttctaggaatatcccgacaacctttggaatatcgccacataatcccatcaggcctgtctgccagaaggaagtctgatattgcactgtttgtgtcgaaatccattcaaaattgcagatcgagagataacccgccgatcgaatgattgcaagtctcaaacattcacccgggaaatgtgattggtgctagtggaggatcagacactaggtacggaccagtcgcattgcaagctgtgtctctttttccgtgatgtgcgtatgttccctgtgcacgcatttccttgggctccactggcggtttgggagaatggatggatttagtgatgttagtggatatagtggtatagagacacttcaagggctattattacaacaacgcactcggtatatctgtaaatagaataggcaatatggcactcatatcgcacaatatctcatatcagtatcttataataacctcagtactccgtaactcccaatgtaacccctgaagacagttacgcaccccctttccgcactggagacgctaactagactagcgtgttttccgggtctggcacaaagcgcagtcccccatacaatcacaatcgctaattctccttgagatctcaacttcagcttttcttcggacttgctctagaatagtcttccccatatctcgaggggatatggcccactgaattcgatgttcacgatctttgatggcttcaatgaacatgggcatgttgcccaccatcaaatgctccaattgtgggtgcaacgtcgagatctcctctatgggggatcatacctgcattcgaaatgagttcggtaggctttgaatatccaatatggccccggggaagtctacatgctgacttttgctccagttgcacctatcccatcaccgccttcatcggcaggattcgaatcggaccgtttcatagaggcaaaggttggccgagggaggccgccggctatagactcctccgctgcaagtatgtctcaaatcgccatgtggaaagctggagggattcccgactgacccttacatatagatcgagcattcttgcagcccagtatgccgacaccagttaacaatctccatctaccacctctccctgccagtccagtacctccatctacggtgcgcccgtatcagcacagtctgaccgatgattcggtcttctcattccccatgcctggaaacagatcgccgactgaagtgaggacaccgagtccaatgacggatcggactgcgcctaaaccacggccaccactttcgtcgcagggacaagggctgagcttgatgccagagaatataaaacttccacctagtccaatgccacctatgtccccggataagaaccatcgcagggaggagtcggcggtgagcaacagcagctatcggacctctttggctagcagtcgctacggcggttctacaacgagatcatcatccaacagcctttcgcgtggtttccggtcgtttatggacgataccccaccgatgccactggcacctctccgcacccccaatcaatcctctttctcccgtgattccaacctctcggcgggatcccggattagcaaggaagaagccagtggattcgactttggtattccagaagcccaaagcccgattaccggactagatgatctcccggaggaacctccttcgtccaaattccaggataataccaaatatgtcgctttcaatcctgcgaacctccaccctgcggcagcgacgacagagctaggtaacgatgcaccaaggaaaagctctaacgcgagtacgacgagtgcattttccgtcactagtttcgctcgagctctcggtctggaagagcaaatgaatcactctgaaagctctggctccgattcatctccttccgatgcccgcagtggtagttccatgtccagtgttccttccgatgtcagcttgaaccgacacaaaccctccgatccgctaaatctgtcacccttggttgaagaactgcccgctcggacccgagagactgttctagaaatacctggcagtataccgagcaccatgggcgatgtccctcttattccggctgctttcttcagcccggattcacccaccgacccttcaatcaaccgagatggcttgtcgttgattgcagagaggaaacatgtgcctccgacttcgctcccagcacaacccaagcaatcgatcccccggaagccaccagcacaacgctcatttacagcacccgtaccacaagcacagccacaaacgccaccgacacccacccggtccgtgacacgttcgaagggaaagtgtaaaggctgcaatgagataatcacaggaaaatcgatatcatcctcggacggacgtctcacaggtcgataccatcgtggctgtttcgtttgctttgagtgccactctcctttccaaacggtcgatttctacgtcctcaacaatcgacccttctgcgcgcagcactaccacgagcgcaacgggtccctttgcgccggttgtcacaccggcatcgagggtcactacttggagaccgtcgagcggaaccctgcacggtctgatcgccgtcgattccacacccagtgcttgcagtgtcgtacatgtcatatccttctcaagggcgactacttcgagtggaatggcgaagtcttctgcgaaagagatgctcgccgagccgctgctgcctcccacccgccaccccctggtcctcctggtcctcctggtcgtctccgccccacactacctccatctcccctggcccagtacccaccaggcccataccatacgcctggtggaagacacggacctggatatgggcctgggcctgggcccggactccaccccggtgccccattcccccctggtggtggaggacgattccccgaacgacggactactaagcttatgatgacttgagcaaaccgtgcttgtcattcttctttcttgtgaaatcttgcaaaacgctgagttgcacattccttttttccgcatatctaccgcggtttgtattccactttcttcattcctttatatatcgcgatataccctctgtgctatctcgcccatttggctttcgctggcaatggtgttggtcgtttgttttcccctctacatcagggctatcctacatctgcatccatcgaaaatgccccattggcatgttttgtgatttttgggccatcattcgcggtggtgtatttgttgattcttcatgccgaaatgtttctaatgtactctctatcggctcggtgtttggttggcggattatctcttgtacatgatttacaactagaatatgaggacctgtgagattgatgccgaaaatgaccgcttttgaggccagaaacggctgcatttccacccgtaactttagacgtgcagcggccctcaaccgacccttttttgcccgcccgcaatacggtgatctctcgcctttatggcatttctgtgctttacgggcgactaagtgtgccatcggaacatgactctcattgaatggagggcatgggtatatgtggatgtgaccgagagcggcggcttccgagtccgacggggaccacaggaagtctgtggtcggcggtagtattcggaccgtctaagaaaccttacctatattgagcgagtggttgtatccatcctggttgccagcgatcacacgttgaaggtctattcttcctgctaactgcggtcttaacgctgcgggatagataatcatccaaccaattgagatgaaataatgatttgtctacgtcattttgaatactctgcggcgaattagacgcatcatgcagctcctcgggggatattgaaatagttgtagtttccagggcatgcgtgaaggcgtgcaatgagagggataggaaggcgaggtagaatcccacgcttttgcttctattggactgggacatgatgaactcccgatggttccatatgaaggaggctaggaaaccagaaacaaaaggagggcgtgctggttatacaagtatggatccataacaaagaacggcttccgcccccaatgtacggagtgactgcagaaaaatgggggctgactacggccaactcaatgttggaaccgactctctccatcataccatctttctaccaccgctttcctgcacttcggccaactccaaaatgaacgctatagactctgaaagatttttctggggcgctccaacttcgaacgctaagtcagtataccatcttgcgcattctttatttgctgacctcgacaaagcttctgtgagacggactacgccgtgagcagatacatcgccgagtttgtcaacagcttgacgaatgtcgtctacagtaagatactggaaagaatgtgaaattctgatctaactgatcttcatcggtaatctacggcatctacgggctacgctacctacgacggaaagcgaacaagtatggtgattctttactgaatccacgcaaatctagtctatggagtacttttcgagccaatgcttgcgtttgatgtgtgatctgccaatcggattgcggaatgtgcccggcaagtgggtctcccagctggcataatgggctgatgtgcggtcaatagttcggtgggtgtgggggaagagcagggaagacgggtcttttatatcgggagtattgaagggaggctacgagacggcgtattgatgcgctaaaccctcggaggcaaaactaactcgaaaaggcaattcacagggccgccgtttacaagtttaatggacgtaagacataatgtgtgttctaagtttgatcaaataacctaaatccatgcctcattatatcgtaaacattgatataccattgcaatcatttcgacttgtgattctcaagctctagtggctcaaccggatagaggtacacacgcttcatgatccagccgaagcaaatgacataaagcgccaccgcgatgatctccatacgttgtctcacagtgatgcggtctaaactgggatttggaacacccaatacacccgaatgttccttctcccacccatcgcagacctggcggaatcgaccgggctcgtcggagatgacgccgtcgatctcgtgtcggatacaccaacgcattaggttcggcgaattcaccgtccagacatagactttacgccgggctgcgcgcgcctcatccaaaaacccccgtcctagtgggcccatcaggatcttctggttgatgttgaaggatataaggggtacttgtaggaattggcgagcatagctcacgtcgacgcagattagtgtcactgcacacagtggcaagtgctttgctcgtgcggggaggtatcgtgaagaccagaagccgagaacgattcgtcgctgccagtcggggccgcccgcgggtgtagggactgactcgatggttttggcaatcagttccattatggcgaagggttcattggcgagctgagaagttgattatgttaatgaatgatgatgtgcgaatcggggagaaccacctacctttatgtctagcaacatccagaaattctcccgacctggttgtcttaggtattctaacacatcggccaaccggggcatcggttcatggggagcttgtatagttcgcagagtttttaaatactcccagtcgcactcgctgaccttcttcttaataccgtagcagcgcatgaggcttgcatccttggatcgatgagcgtagttctagatcgggtgtatgcacctacgtgtgataacaccacgattccatcgcgggaaatatgaaggtcaagctcgagggcttgagctcctgcccgaatggcgccatcgattgacaatatagtgttctcgggatattggcccttgaatccccgatgggcgatggcttgaggcaaacgcgggcaggcgtgggcaaccggtgatcggtggaaatgagcttgcgaggacgagttaacttgataacaccgacacggagagttacacacctggaatttcatgcaaatgatcttgcgaaactatagacgatgggtcgcccattttgaaaagagttgtgagtgttgaagaagagatgccatcggagtttggcggagatagaccccgctgcacggtctaatgtggactcaggtgctcacagttgctttccagactttctattctcgtgcggaaagaggccaaaagatcgggatcagcacttaaagatctctgtctggtcttcaaccgccaggaagaaagcagccctggagctttagagaggaggctggtcgaacaccccgattactcatcactagtgaggtggatccgtctccaatttccccatgttgatttatagcctccatttcccaagttgttgtgctcattaaattgcatctgttctgcgactaagctggtagacaatggccgttcagcaatggatcacgcccttgaagggaattgacagccttagccggaccgaagctcccgttcccgtaccagggccgagcgaagtcttggtagagatccgtgctgtctctctgaactaccgcgacgtggaaggtaagtcgcccaccaagaataaacatgtaggacatatgctgaaaaagtctttcaaagtgaccaacggcgagtataagcatcacagaacagccaaccaggatgccaccatcgtaccctgctcggacatgtgtggggtagtgacacaggttggatctggcgtgagcaagtggacagtcggcgaccgggtgctttcgactttcctgccagatcatcaaactggccaggtgactgagaaggagcttgccaggagcctggggctgccgcagaatggtgtccttgcaactcaccgcgtgttccctgattacggcctggtgaaagcgcctagcttcatgtcagatgaggaggcggctactcttcccatcgcttcagtcacagcatggatgtctataaatggtttgcgaccgatggggcagagcggcgggaaggatgaatatattttactccagggaaccggtggtgtggctattgccggactacagattgcgaaggccgctggcgcgaagggtgggcaatcggattattaccgcttataagacctaatcgctgatcttgcaaacagttattatcacctcctcgtctgatgctaaattggagcaggctaaagagctaggcgccgattttaccatcaactaccgcaccaaccccaactgggaaatcgaagtgatgaaggtgactgagaaccacggtgctgatatcatcttggaagttggtggcgctaaaaccttgcggaagagctttgattgcatcgcttttggggggttgatcgactgcattggctatgtctcaggcaagatagatgccgatgaggaccgcttgaacgtcaatctgctggctcttcgtcggacggtcaccctcaaaggaattatcaacggcccgaaggatcggtttgaagagatgatacggttctacgaagaaaatcagattcacccagtagttaaccgggtcttttcatttgccgattccaaggaagcattcagatttctggaaagcgggagccactttggtaaggtagttatcaaagttcaatagagccctagggctctaatggtgtcgaatctcattgtcgaattatcattcactcctgattgccacttggcttcattatcccagcgccaattcccagatcttctcccatttccttcccagccaccgtcaatttcttgcaatcctgcagcacgaacaggagacgggcccattctgtcccgctggtattgcgccatccatgcatcgtagcccgctgcacagcaacatctcctctgttcatgatgactggctcgctatcttccaaaatcatttcaacctgcccctcgagtaccacgccgtagtcgaggctctgcgtccggtgaacgacagcagggttgttgggcgcgaagtccacaatgcggcatacggttccaccagggttaacgagtcccagctggccggattgtgtcaatgtctcgtgggtcttgatgtccgcgtcgttgttgagatccggagggaattggctcgtataaacaacattgaatgccatcttgcctttttcaagtgatacccattcagccggtgtcgacgaatgtatcactgccttcccgttctcgttgtgacctgtgatatgccgagtgactacccgcaaaggcgacacttcactgggattggaagccattgtttataggacacgaagtggaaatggaggtatgaagctgttgaaatcaatcaatgtgcggaatacaatgtgtgccctcggatgattatatagtctcactccacgtgacacggggcggtgcatgtcagcttgaacagcggtgagctggatggaaccgcaatggcttacgagtatccttggttggatgtgggcgtgttcgaaagcgaccatcacgtcagacctgattagaagattgtcggttcggttgccactttcggcgctgactgcgatcccgtagctcagatcgggcgcacaaaagaaaaatccaagagacaaatgttgcagacgagttcaactacatcgatataagccaggaaccctcccgggggagcttcaggattcttttttaccttggtccacaggtaggactaccagcaccaccctaattcgcacgcgaggcccatatccatggctgggtatttagaggattgtgatgattccaagggagtaccccttgcttttggaggttcgatttctctatgccgactctttgccgactctgacacacattcggccgacgaagaatccctcgatgatatgtccaacgcgcatttcgtcgagtcgtgcacatatagacaatcaccaggcagtctggctttgcagttaagcatgcctcggtttgaccgtaacctcagcaactgcatagaagcataaacgcctcgtactcgagatggcgacaccacgctcgttccagcgcgctgctcgtgatcccaccaggtaccaccatcagcagagcgccggcatgccgaggaatgcctcgcaatgcttatattaaggagtcggttccgatttgagcggtggagagtttatgtgaaccaatagcttgatgcaatctaatctaacacgagaaaaatagtgagttgatacaccagagttggggggcgtgggggtgtgggggttcttggacgacggaggttatagttatcttggaatcagatatggatggatgtaggtaaccctaatatgaagttagactgtatgtgtcagcgagattaggaacatgaggcttatggacagatgtatattcatttcgcctaactagatatagatgtgatgtttcaaccttgcttttacaaaaaccatcggaactcagcagatgcaggcccatctctcattcgctccgttggaatatcccgtgcccggatcgtggttccatcacgacggtcacgtcgcttgttatctagccacatgtagagtgccagagaagccgtcaagaaagcgccagtagcaccgaatgcaccaacactgattagtgcgggagtatacttaggcgcatcctgcttccggaacaagttgctgctcactaagcccatcaagttggccaatggcacgccgatactcgtcaacagtacacggcgaccctcgtgggcgatgttgttattataccaggtgctgagaatcacagatggggcggacgttccccaggtcatcatgaaggttgcgaagtaagcgacgtggatgtttgctgggacatcgtcaatggatgcgtagatcatgaacccggagaaagtgagcaggaagcccagaacaatgaatggcgatcggagtctggtccagtcagaggagaaaccgagcactagcaacatcactgctcctgtcacattgggtgcaacggtgtacaggttggttttgacggtgggaaaacccaatcccgcgatgatctgcggcatgaagagcgcgacaccctgcaaaggcacaccgagacagatttcaatgcacaagaaggcgtatgtagtggggctcttgaagataccgagggcctcgcggaagctaaactcctcgttgaccaccgcactggagtcgacttgaattcggtggaaagctagcgccttctcctcctcggacaaaaactttgcctcggcggcgctccgtgggagatagaagaaggcaaatgcagcgaagagaacagtgacgccgccctcaatgataaacaaatagcgccaattggggatatgggatcccttgatctggaatactccaaacgcaataagtccggagaaagcgtttgcaatgttcgacgcagcgtagaaaacagccaggcgacgagccagctcaccacgacggtagaatgtggtcaagtaatagatcaccagcgggaagaatgcagcctcggacatgcccaggaaccagcgcaaggcgaacatgccactgaaattataggtggccgaagagagcaccgtgagcgaaccgaatgaaaacatcaagattggaaggacgcgggctggactgaacttctttccaagcatcgagaatggcggcgcaaagatcacgaacggaacgaaaaagatggataacaggagattgtactgattcggcttgaagtgcagatctaaagattcgattagactcaagttgctgccacttaggtccaggatctcacatacccgtgctcattccatccgtttccgcatttcccagatttcccttgtcgagggcgttgaatagatctgtcgctggtcagtttctgcatgaatgacaagattggggtcgacttacacatgattgctaggatagggagaaggcgatagtcaaacttccgacagagacgccgttcagccttgtggtcgacgactcgggtcacctcttccatcacacccgggaccgagccatagtttttcaacgtgttgggctcctcgatagtggccatggtttctgttttcttcgctgtgccatcaggcgacgatgcgcgtgctgggctcgacatactgtatccaaggtgttatagacgaagaagcgtagaaaggccaagtcagcgcaccgcctgtcagttataaaggtccagaatccaagcttcttatcaaaggagaggtggcatcccttgttctctctgagataggaagacttcgggaatgttgcacccacgcataaaggacacccccacgtttctccgcatcatggaagctttagctgaacaggcaaagatcgcctgagatagtcgcatttaggccgttggggtgcttatagtcttatctgcgggggaaaatgtaagtacatcccgcgagcttgatttgaattctataccgataagtttatgttcgtatcgccgataaagtatgcccctttctctcccttgctatcctacgaagatccgtatctcaccgatttattcccgtttctcaatctcctagacatttcttcgcataagagatatcccaattccggtgtatcaggtacagttacatccgtcgcatgacctcaccacatcgagccacgcttttggaataagacagcgaattggagtagaaaatactccaaaaaaaaacgttattcttgatcagggacctaaactttattaaaacttccatggctttctcggaggcaacattagcatattcccggaaacgggacggcgtaattatcctagcatagccaattatatattgagagccaattcgaatcacttcctgattactcttaagttaagcaattggaactgtgtggcgcattccaagtctcatgcagggccttgcacgtgaatgttatcgcagccttggcggggatagtcaggacagataacaggtacaacttgtacggagtacttctacatcgactgtccacttgaaacatttagttattcttcaggatactgacattacctaatttatccaagatcccggtaagaaagctgagaaagaagctgcatttaaccactcccccgcaatctgtctttgcggagatacagcggggaaatagaggagtcaatgtcgaaaagaatgtacccacattatccggacaaaatcttttgatgattcattataaggtgagattaaggttgtatttgaaatctaggaaaaggtgacccttgtaccagttgactacctaccaccgactatgtttcaactcatatatatatttataatctccctgcgtgctcacttagtatcttcctaccctttactagcccgaggaaaccatgatggcaagaatttccactgggtgaatatatggactgctatgccgcagttggtcgagcccactaatctacctcctgttccatttgtacgttggatattcatcatggtaatgggatcaagtaaggcaaggtctctatactgatagtggcgtgcagaatggatccaccgctgtattcaataatactaccattcgccaaaccctccaggtttcattagcagcacaggaaatccgtattcgtctctctaatgtattcgggccaaacgatctcaagatttccaatgcgactatcagcctacctgcaagacaccaggtgggaatcagagctctacagacagatacattgaagaccgtgttcttcgatggaagcccagatgtggatatcccgaacggtgggctcgttgtgtctgacccaataaagttccctgtcgaggcccaatcggctctcatggtcaacatatatctcgcagagggacagcaaggcttctccattactggccaccctggaagtagaacgacctcatacctggctttgggggactggactagcgcagagaacctcacagactcatctgttcaaagcacagatcattggtgagtctttatcccgcaaaccttacaattatcccagatccgaatctgtatctgacctctatcggatggtaggtactttatcagtggagtggaggcttgtctaccctttgagtctagtggcttcgtgatcatcggtgacagtatcaccgatgggcgaggaagcactacaaatggcaatgatcggtgagtggactgttccacggtctattcttatggcttatggatttaagttggccggatctattgctggcaagaatgcaaaaacataaacccacgtcaaatatcgccattctcaaccaggccgccggtggcaatcgtatcatacaagatggtctaggtccaaacgtgatcagccgtcttgaccgggacgtcctagcacaatctggagtgcaatatgcgatgatcttcgaaggcgtcaatgatattggcgtagctgatagtgatgcagctacgcaggcggatatcgagaagaaacttgttgcggcatataaacagatcgtgacacgggttcatgcactagggattccggtatttggtgctactattacgccattcggctcgtcgaggagctccgagtatgtacagctttactcaagtgctgagcgggagaggactcgtcaacgaatcaataaattcatccgggaaagtggcatattctatgcggtactagactttgaccaggtgttgagggatccgtacgcgccatctcagttgctggaaaaatatgattcaggagaccatcttcatcctagtgtggctggatatcaagcattggcagattttttccctctcagggtatttgaatgaaattcacatagttattctcgaatagtgggacaaaagcaatctcgagactattgtccacatatgcaaatataggtatatagttttcggaccaacagatgaaaggttcaaacttttcgctcgaaaaacagagtttctttaaacacgacgtctgaagttgtcttgaaggttgcgctttctgtaagcgccgccaccgacaagagcctgcttgcggccagggccaaagtccggaacaccgccgagagaaccgaagatatcaccgacgtagttatttgccttgataccagccgcgaaagtagtattccacccgtccagaataccctcgacaaccttgataccagcaacatagaggttcttaatagcaggctcaaatgcgccctgcgctgacgactggaagaggttataggtcgccgaagaaccgggataggggcgatcaaagtccgacgcagtgcgcatcacgataatgcgagagaaatcggtcagcttgtgcatcgaggatcggagcaagacttcgaatgtagcgttatcctcctgcgcggttgtgcaatagtcgcccgttccattagtcaacaccttggtggtattctcgaacaccgatccgaggatattgccgctgaagtacacatcggaggtcgcgacatcacattcaacaacactaggagatagggtggcagccttgtacttcccactaggggtcttgtagtgggagcggtatgcctgagcagtggcagagtcggagaggtttgccgtgcgcgcaaaattagcggcaattgtgcgtaggtcagcgttcacctcgaagacctctgtaccgtagatgctggtcggatactggcctgggaattcggtaccttgcgcaacatacccggtggaaaagttgctaggaagttcgcggatatcaatttcatactgcagcgcgacctggactgcgtaccgagcaaaggctgcggatccagtggtagctctcttaggattgacgccagcaatgcccgcgacaaagaagtaggtttgcgtgagatcaaagagaggggagaaagcaacagatgtgacagtcgcagcagcattgatctcgccttctcccgtgatgagttggcaaacatcatagtcctcggtacagaagacgtccgggaacagtggtgagagaccgggaatggtgatattgtgggaaagcaggtcgaattcggggatgttccaccaagcttcagcttcaggtgcaaactgtcgtaatctattagcgacattgcatttattttggtggaagcgcataccattgacacgataaacaccttcggggcaattgctccacggtgaccctgctgggcggtcccagtagctccggcgcataatgagctgccagcgagcagaaatgaggccgtcagagtctgaagaaggtgcatggtgaggggagttgaagatggaactctgttcttgaacaagccgaggccttttatttgtagctccgtagagctgtgaagatttggtacggaatagcccttgcgtctttcgcgctaaggatggaacattgccgatcagtggacatattggtacctgattcggagaagatccgcaccgaaacgtggagcagcttgccccaaaaacgccggagattctcctatcgccctttctgacagaattctattcgtccgaggtagatggagaacacaagccattgatacctggtttttgactggccctttgaagttgaatgtgggtcgacagtgatagggtttcacctattattttgatgactgttgcttttcaagcatcggagcttgccggtgaacgttggaagagattcagaaaaagaacgagctcgatggtttcacagttctttaagatccttgttgtggagcgttgccgagggatacttggtactcgcgttgtaccagttgacccgaatgactgctcattgtcattctgctcgaaatatcgtgtctatcgaactcaaaatctatgccgtatccgggatccatctggtcgaaggcctgcctgctccgtgttagacgatgaaaggaaactgaatggaggatgagcttacctttccggagacttgtttactacgaaatacatttcacaaaaaatagaacactcgtagatcaggcgaataaggagcattagatagatgaaacgcaagccaattccctgaagtataagtccacagagggtacatgaccaattgcaatcaatttgaacaaatcgtagtgaactacctgctgctcaatcattcagacttccaccaccatttcatgacatcgccaaacacccttgctcgtacgagccacatgatgattgaaggaaatgtcgaggacagaagaccacaagcaatcgtgtgcaaattgcggttatacctgaaagccagcataagaaaatgaagtcaaagtcaactttcccgagtccgatacgacctcaatatcctccgcatcttgattcgggtagattagggccgacaacgctgcaacaccaccgttcacaaacgtctcaaccgagttccaatcgacgtaaattgtaagctggaccgtgtccccacctgcaggatttgtcgcagtccgtgtcacgtcccaagtctgtttggcatccgatgtcaaaacatccgaagcggagccgtcagagtccctaaccaggaagagctgggaattggcgaagtcgtaaccaactgttgtgttgtaggttccatcggacttgatccggaagtaaaccgtgttgccatcatcaccatcggccttagacaccgttgcttgaataacatatgcacccccagcgagatcagcaggaagcgatgccgttgccgggtctgttgttatttcagtcccatcagcggagacagggccagcaaataagtctgcatagcctgagactggaaggctgactaacatgggagtcccattgattgtctgatacttgatctcccgcgctaaactttgctggccctcgaagtctccgtagtagggcagataggaagcataattccagctattcatccagccaatagcatagcggcttccaaatttgtcgtctggattttcccagctgacagtggcgtagaagtccggaccttcatctaaccactgtggaacgctggtcgtgggtgtaaaattggtgccatcccatgttccagaccaataggcggtacctgttgtctttccataattgtacccattcgcaccgacagcgaggacccagccacgtgccgctgcgtcgccgtcaaggttgagctggaataaatctgggcactcaagagtacccaagtcgacaccagaggccactggagaaaaggtcgagacgaatgtccaagtcttgaggtccactgatgtatagaaaccaatataggttccttctgccatcacagtaacccactgttctgtgtcgtcgtcccagaagattttgggatctcgaaaggctggtttattgtctgcgtccgggttgggcatcacgggatttccctcgaatgaagtaaacgtgtatcccatgtcggtggaataaaatagcgactgctgctgaacaccgtctcccatctgagtaaggatagcaacaacagcattctcaccgaagccggccgtgttgttcacatcaaccacagagcttccagtttcaatgtcgcctagatccacgtcgctgacagagttgggttgatacttctgaatagccacaccctgatgagtccattgcaccatatcggggcttgtcatatggtaccattctgtcccacccgtgccggggtcggagcttatccaatcggaattccagaggtaatagagatgccattcatcccccacgtaaattgggcgttgggggtcattcatccattttgtttccggtgtgatgtggtagcttggtcgcgtctggccggaggcggaaggaaccattgcggctagcagtatagatgatgctagaaaaaggcgaggcagcagcctcttcgctgcagtgggagaactcattgcgatatgagcaaaaaaaaggttattgaaaggaagatctattggccggaatgccaaagatgacctagatagaagtttaggaacattcttgaagatatatatactatccctactatcctcctgtccttaggaatgatatctccttgcataaaacaaatgcctgaacgatcattccattgcaggagactagtggattcagtgaagtcaggtggagtcgagtggagtcaaaccgcccgtcccgcacgagtttatcggaatttcgctcagccctttttgtatttgacattggcttcttcgaaagagtttgtggttgtgccgtggtatacgccacgtggtatacaattgagttgtgccgaggctggattatatgaagtctgcttatacgaagtactatttctcaaactccgtagtactaccactgaaacaccctagtgtcccatattgtcggaggatagctgaacttggtctaaccaaatacatagtcgtattccgcatcactccgacctattcccccctgctcatgcaatcctgccaaaaccagccactgggtccactacaatatacgaactcgcagtaaaaaagaatatctgaattcagcaactagacacatgtgaaagtactgaaccccgcagctgtgaccaaaggggccaacatctcatcccgcaggtaatttacgcacccgtgatccatttcatcacatggaagtttcaacctatcattattatatggaagaagaatccggtctggggttggggagatccgtggacgagcgaagacattggttacgactcaaactcaaacgccataaggcgcactcttgaagcctcgatctctactctagtgctttagtatttgtgctttcactatataaaggatccgctaataatatgccgattggttctggaacaaacaaccacaaagttagttctccgccaagactgccagtgcaatatatcgctctacactatgttgtatatttcatttggcgccaggggctctgagttcacaaaaaatgctctgatgcttgcggtataaactcatatggttcttgccaagtagcccctgaaatacaccgtatgacccatgggctcaagtggacacttggtgtttgacagattctcataatgtatgttgtagtatagcattctttactaccggtgtttatcacgactcatagccacagttatatctatgtgcatttagtgccttctttctcatctcggccatgttgcggtatagagccagcgaatgggccctgctcgtcctcgttcctaagaagacataagcgatccagctagtccccaccgtggtcgacacgacaggtcccggcgccggataaatctcggctctggtgacatgaggtagcattttaggcagtactccgtactttgaaaagagatcctcgcccacgcgacactgccctacccgacactgccctatcagtggagacgcccgacacaaagcccagcttgccaagtggagatcgtcgacctgttctggagctagcgtttgagatttgaaccgtctcggaaaattgtcggaaagcgtggcgccgctggcgtcggcaaagcggggaaagttgtctacgtacctagaggaagaggatttggccctcccacatgacgaagtttgcgtcaacctcgggcctgtcgatgtaccctgctataccaggttctccttctcctcactcagcatacgcatcgccgcgcctatgctggtgtcatcaatgactctttttcgacacctttagtgttcatgccctgacacagcttaacaactagcgggcactggagtgcttagagagtctcagcacaaacacgattgtcgagggtcttctctttctaaggcgacagcttgaataaggtttcttaagcaaactcgcacatcctgctttatggccccggtcggagcgttcagcaggtcagcaagcgcggtggccacaaacctcttcaccaagggagcctcagtgcagctcgagcaaaggctctctgggtaggtggctgggacaggaataattcggctccaactagactgcgaaatgacgctatcgacatacttggggtgctgcattcgaatcaggagaatgtcccggctggatacgtataatcgtctcatctcgatatcggcctcaaccttcgtcgaccaaaacgggtgacatagctatgcgtggcacaatcgcgttagggccgttccagagatgttgagcgattcatcggggtttgtagtgagagacgggctaagccgcagattgacgcagtgataatagaccagagcatgccctcggcgcaggcattatcctccctagggatagatagatagtggaatctatcacatctcttttttcttttgctttttgctttttgttctttttttggttttttacgcctctcctcctaggtccacgaccacatctctgatgaatggaaaacatggagtcggtccaaattctgaccatatcctcctcaatatcctccctccagggtacagcactaagcccgatcatgggctcatcaggtgaatgactatatatgactttggctgatgggaactccatccgacgccgttcaactcatcccccgtttccggtgactagcgcaagatccctcctgctttttagcgccattccgtgatttatcattaattggcgtgcctgtctagtaatttcccccgcgcattggtcctttgattgctcagcagcaccgtgttgtgctgctcgcacgcccgcgtcttattactttcgaatgtgcctccgttgtccgttgctaacttcgtcttgccttgattctcattgcaagctattggctagaacatttgcagtagtcgactcattgtcggacccattggctcgggcaagtttacactttgcaaggcgatactcggagagattccttttcaccagggtgaaataacgctgcgcacaagggctttgtacgtcggattttgcgatcaaactacctttctattaatggaactaccaaggaaaacattataggcctctcttcggtaaacgaggaccgatatgctgaggtagttgaggcaacagctctcgcctttgactttaaaaccctaccacaaggagatgagacaaacgtgggttccgatggtatatccctatccggaggccagaggcagcgaatttccctagcacgcgccctatacctacaagccaacttacttattctcgacgacgtctttagcggcttggatgcggacaccgaagaacaagacttccgcaaagtcttttcacctgaagaactgttgaaacgccgtcaagccaccgttttgctctacacacacagcgttcggcacctacaggcggaagactacgtcattacccttggaaatggtagcgttagtgagcaaggcacatttgacgcactgatagctggtgatggctacgtccaccgtctggggttgaatggcttgtccgaaagcgagacaacgtctgaggaattgatcatcgaaaacaatgtacaagaatatttgtcgccagtggataagataaaacgggccaagcttgccgttgcccccaatttggatgcgtcccggcaagttggagatggcactgtctacaagcagtacatgaagagcatgggatggctgctcgcagggtctgcagttttctttgcttttctcaggggcttcttcttacatttctccaccatctgtaagtactacacgtctttgaatacggaatttattctagagaggggttcttggaagctaaccgtacagggctcatgtactgggtcgaggacgcacaatcgcaacgcccaaaacaccattccgcttactgggccggaatattcgcgctgtttcagatcggtgtcttgatctcgctcttcctacttggcgctcccatttggattgtctctatcaaacgcgctggcgcaaacctacacatggatatcttgaatacgctggtctgagcaccactcagtttctccactaaaactgaaattggtgtcacaacaaacttgttttcgcaagatttgaatctcattgacacggagctgccggatgctacggtcagcacgcttttttcggtaggccaccgcataacgaaccattcaggagacctgagtccaacagctaacatatggatagatcacccaagttgtcgggcaaatggctgttatgctgacggtgtctccctacttggccatcactttacccttcctcgccgccctgctgtacgtgctacaaaagttttacctgcgcacttcaaggcaacttcgattgctcgatctggaagccaagagcccactatagtaagtgaattagagaatatcgtcatgtatcttcactgccgttactgacacacgtttagcacgcactttcttgatactgttagaggcatcacaactttgcgggcattcggtaggtaccagttacccaacttcctgcttgtccgtttgatttacggtctctaatccaacgcacataggctttgtccgcgaagatatccaaaagaatgcctgttttctcacctcgagccagcgaccttcgtatctccttctcatgatacaggaatggctgaatgtcgtactcgatgtggtagtcatgctgttggcagtagggttgataacggttgccgtgcgcttccattccaactctgctctcactggtgctgctctatacagtcttttgagctttggagagaacctcgctggtattgttctgttttggactaagcttgaaagctcgcttggcgcgattgccagacttaagatattcaacgagacgaccaagcctgaagacacagatggagaggacattgacgtacccgaacagtggcctcagcgcagcgtggtggaattaaagggcgtttcggaaaaatatgcgtaagaatcacaaaccacttaccataaccttggaagatgcaccactgacttattattagcgccaaagatcaggacgacgggaaaacgagccttactctccccgatattcagctaattattggctctggagaaaagattgctatttgtggtcgtactggcagcggcaaatccagcctcgttgctctacttctcaagctcctcgatccaatatccaccacgacggagaatattacaattgatgacctgccgcttcatcggctgaaccgatccgtgctacgccaatgtatcattgcagttcctcaagaatccgtcttcttgcccgatgggtctacggttcagaacaaccttgacattgccgaggaggccacccccgaggagtgcaaggccgttcttgaatccatcggcttatgggactttgtcaaggaacgaggcggcttggccacaaggatgaatgtctcgagatttagcgctggacagcggcagctgctctcgtttggccgagcccttctcaggcgctccgttcgagagcgcaagtttggggccactgggcaactgggcggcatcctcattctggacgaactgagctcaagcgtggatcaagagacggaacgcatcattcagggcaatattaggactgagttcagagactacacggtgattatggttagccatcgattggatatggtcatggactttgacagggtggtggttatggataccggcgcgattgtggaggtgggcaagccagccgtgttggtgcaacaggctggaaccaggtttggtgatctggtaagagcaggaaacaagtagattgaatggtgttagtgcaatattcagatgaggatgtcgagataggaatatggcccccctaggccttaaacggaaccttggtttttgttatattatatataatacgatggtccgagtgatcagagcgcatcagttatagtgaatgtgactatgtatgtagcctaagcgtatcaatatttactctgagggcctctaagcacccaatgaaactgcttaaaaaggaaatccggtacaggtacatgcgtaacgtgtctgtccaaatgtcgcatataacaatagcgggaaggccagttgtggatgcgctgatgctggggctttcaagccaccgtgactacatacatttaaacgtggagcatgacgcatgtcaaacatgcctacttaggtacttagaatcgaaatcccaataggatataatgctgatccccgcagattagattgtttggttctcaacgtcatctgacgtcattttttaatataggtaccagtggatggcaaagcaataaaatcaaggccaggcacgctcacagtcgtggattactttttgtttcgagctcttctttcctgataagagcacccagttcggatacgcaccgcaatacagtcccaacagcgtctctcctcgatataccaccagccaaaaaactacgcaactcatatctacatacccaccatgccgtcaatgcacgaacgtattcgcgaggatctcctcaacaaagagcgtgctctctggacagctctcacatccgctgatccagcaccagccatctggaaactcagcaaccccgaagcctgttttctattccctcagatgaatatcatcacgcttgaggacgaggacgctttcaagaaagccgtccgaccgccctttcatcgatttgacgcctatcagttcgaggaggtacgagtcataatcgtcgacctgatggccggtgtggtcacatacaaggtgcgcgctatgcgcgggaagaaagaatatactgcctcgggctcgacaacctggagtcaaggttccgatggcgagtggacgctggcttgtcaccaggaaactttgatgtgagaggattgtttgtgtcgttgtttttgtatacacccggtttcttctatacctttcgcgatgcggattggggaagggaatatgatcttgacgagcggcgaacgtctgttttaagtgatatgatgcaatgtatcacgagtcaacgaatattttaatgccatgatacatgatcaattttatgtgaagtcctaggacagttttctagtagataaatgggggtttaagtgttggagtggtcaactaactagcatgatgattactagtgtaaatagactgcgatctacactcaaaactgtcggtagtcagactgttcctatttaatgacagtaattgcaaatttattgcgatcgatgcatattgtattgatgttctcctctgtggctgatgtatcacgtagctcagccgtggcgcagtttctaaagcaccgactctcctttctctaccgacagattttcacaagccaggggtagtcatcaatgatcaagcccgtcaggcaagaaacgacccatgacactatgagagccgcatcaaacaacaagaatcacgagcatttcaatggcgatcattcacttatttcaccgtaggatctcccgaatgcaacaaaaacaaggcctatcatgacccggttcatgaatatatgtctgtatgaatcgtttcaattcttccgatcgtgctggatcatcgattgcgacttaacgtctggttcacccagtaagcacggcgctactatctagaccgcactcgtcatggtcctggcaagtcctctgatagggtctcatgagtcatgctgtttgtgcgggcgcgaaacgtgcctggctatcatttggccttgcgggcgcatgtctggctctttgaaactcactatgacaacttcatgtaactggcggctaacagtccacagatgacattgccaggcgattagtgtcaaaatgtagtgttcactctcttcaccggtcgcttgggacattctgttgccagcattgattgacaggtagtagtcctccgtactctagcggacaacgtttctgccgatgagttgggcaaaatgtacggcttcgtgatgattctcattggcataggaacatcgggccacctgcacagctggcattctgttcgatgtaggcgggtattgtgtggcgtggtcgagagtgcttttcgggttggatatgatcctgcgatgccagatgctagagcggtctacacataccagtgaacatttacggagcgggatgggcaggattcagagaaggaagaattttcgacaccatcgcctgacgcagatccacaggtacataaacagtcaggctgtatcggaaaaacgggtataaaattccatctatgccaatgtagcaactgtcacttcgttagtgatgtcgttggttatttctgctacaccattcgaaccgctagcttcggcacgatccttctgcatgtccgcgatgtgttgtacattgcatttggaagccccagcctccccgctggtttgttgtttgccgctttccagggccagggccccgcggtattctgtcgggtggctgaaggatcaggtggggactcgatacccgatcacgatcgcttttgctgttttaggatgtatctttaagatggtaaccggtgttcctggggaggaagaagttctctaggctcgccaagaaaagattgtttcgagcatatggcatagctatcacgtgcatcgggtttgtgatatgcttcctcaacgaggtccacgatgagtttctttttttccgactaccacgttgggtaatgaatcataacggatttgcagccgttgacgaagatacgatggatccccttcttagtctcgttagctagagtatcttagatggaaggggataatgtcggaatattagatccgaatggcgattcttcggaagtaatgtctctagtatcagtgggacgctgtggatgttttgttcggccgattctaatagtctctcgagtacggagtactccgtatggcacggagaaaatcggatatcacaggataaattgcgtattggcttcgtatcccctgtctaacttcttcatgtctcacgctaacgggcccagcggggatatgcggaccatattccctcaccgcattccatttaaaattgtctgcccgaacgcgtcagaggcatcacacgcctctggtggagtttcgacgtgagaaccaaagaatgggccatgtataagactattgcccaagtttcagcagttcgtatctcggttagagaaaagtaaacaaagaaaaagactaaaaagaccgaaaagggaaaaactcaaaatatcgacaggccagatttcctaagcttagcgcaacaaaaggaccgaaagagggccgatatgcacagaagcttaaatggggccattatgaaattgaggcatcacaacaaagataaccccagactcaaaagtcgaaaaaaagttggacgttggaaagtggaactgggatgtgtaaatctaaataactggggcgagtggccttccaccggtcttctagtcgttcgccaggccaatgaagacgaggttagggaagatacactccgccttgatcaatcccgtgtgtaatccaaatactgtaacatggatttctgcactcgggcgaccggaaattggtttttccatgaaaaatcgtggggttgtctcctacttggtaggctgcatcccggtgcagaattttcattacggtattcattgaaaaagtcgcgtattttatctgcggatgatctgccctaaatacctacgggatttgtgtctcccggacgtatcctaaggctaagacaaaagggacaaacggtgctgtcaattatttctccgtccagcgggcccctgccgttcttagtttcccccgagctcctttcccatttgattcaagactcatatttcctttgattaaacatcccacggaccttctagtattcccccagactcagcgccactcgccaatgcctacccagagtcataaaacaggcgcagtgagatgtgaggtatacactcggatttctgataaccatggttgtgacgtgaaaccttacctcggatccacggattggcaagccgaaggatccggggcaaaatctttagaggcttctagcctgcccgttagtttttttaggtgcatagtctatactcattctggatgcgaaagccggaatcgtcagttgaaaaaaattctgcgatataagctcatgccaagagaaattccctcacggtacttatctctctgggatcttgacacacacacacctccctactcaatacaatggagccaattcgtcccccacagaatattgccattatcggtgctggcatcgctggtattgcctgtgcattagccatatcccaggagctttctcctttcgtaccgaatttgaaaatcactgtctacgaacggcatgatatactatcgacgtccggcggtgccatcaatctgacccccgtcgcccaacgacatctcgctcggttaggcgtgctagatgagttggaccggatggggaccgagggtggtgccgatgtcgatgccattgagcttttctccatgcgttcaggtcgggcgatcggctccatcaaattcaccgacaaccaaggaaaggggttcggcggatacaagggccgaagggtcatgcggattgctctctccgtagccatgttgaccgtggtggagcgggctccgaatgtggagattgtattcggcaagaaggtgatcgatggcgaggaattcgaggatagagccgtcgtacgattccaggacggcaccgaggcggtgggggatttgatcatcggctgcgatggcgtgcactgggcggtccggacccggtttgtggacgtcggccggtctgctgagtacacgggactgtcattcttgcaagccacaattgactcggattcaatttcatcgcccgctcacttccgcacatcatcgctcaatatctcgcgacatggctcaatgcttgccagctattgtgaccgtgattccgaacagattttcgttgctgctattgttcaatttagtcgggaagcgctcacccgctatcgactggagcccggtcaggattgggccactcagaacaaaatccgctgcgccctccgtgcggaggtaagagaccgtttcggcaagtgtgccattccctgtatcaaagaaattatcgagagcaaagcggactggatgctttatcccgtatatcaagttcgccccggaggacgttggtgcttgaatcgagttattttgctgggcgacgcggcacatgcggtatgtcttaatacaacccccctgtttgttcttctctaatggattctacagatgcccccgcgtgatgaatcggctgcgtatgcactagatgatgcgatcttgttctcacgaattctgtcaacctatcgttccgagcctctgacggaggttttcgacgcatacgagaaacttcgtcgcaacacaatcaaccatgcattcaaagaatcccgtcgtatgtgggcacgaaaccgcgacatggggttcttagagggaaaagtaaaagaatggatgatgtctttccatctcagatccaacgaaagttcacgtgaggccgcatgggagttcgacgcaactaagattgcccttcccacaccagcacccagtgaagacatagtttcattgagttcatttttgagagaccggactctatgaaagaagaaaatacaccaaaatatagcatttcacaggactgtggcggagtttaggttggcctgcatggacgtgagcgtgaatcattaatggatacccggcaattagcttcccaaatattcaatagtatacctatttcgatttttctgcagaacccttgtcttttatttatgtcaatgctttttttgggttatccccatggctggagtcacttagatacactcggctctgggacggaacaggctctaccttggtccatcccgatctaccaacatagtttaagttgaaatttcttttttaccttcctcatttattcgccttgcttcacttacagaatttttaaaccaataccggacagatggtgtaaacagatatagatcagtcattaggtggactcccttgacaagtttcccttattttctggagctcactattgtgaattgattgagagctattctgctatagaggaagatctcgaattgtgaaatccggtagactatgacacctacggaatattatcgcaagcaaagaaggtagatattttcaagagactaaactgcaacgaaagacaaaaaaaatacacacaaaatacacacaaattgcgcttctgacaaagcgattccctatttgctacatagtttctccgatgttcacttagaaggtaagtgtctgaccagcagtgccaacaacagcagccttgaccttagacgagccaagcaggctgtagctgtagggaaccgacttcagggttccagctgcggcggtgttttctccatcaccgaagtcattgccattggcgacagcataaccagagtcggtagagtagaggggcttcttgctatcaacaaaggtgtttgactcaactagaagctgagcgccatcgcgggtgttgatgccgtcggcgacgtccaggtagtagttgttgtagatgtggccagtgccgaaacggaaggaaggaccacgcgagttaaggttataccagtagttgttattcagggagacacgcagatgaccggtgtcctcggcgctgttgctgtccgagtgtccgatcagggaggccttccagtggtcgtggacgaaggtgttggacacagtgatgaagtcggcagcgtgggtcagcttgttcacattagcaatctgtgaatttttctggttccacatattgtgatttggacttacatcgatgagtccgtcatagtagtccttgtcgtgatccaagtcggacgagacatcgcagtggtcaatccacacattggttgatttttctaagaccagtcagcctttctcaatttcctagagaaataaatatcccgcagcataatgtactcacggacaccaatagcgtcgccgttagcggcaagcaccttcttcacacctaggttgcggatgatcacgttgctctcttctttgaccagactatattgggtaacaattagtatcatctcgaatccacgttaagaatcacaacatacaggccaaagctggtcaagacagctgtcgagtccttgccaaggatgctagtattgcttccaacacgaacttgtttggctacctgcgtgatggggccgctcacaacgacaaccttggcagagtcgcccgaaactgcggctgtgaaggcagcatacgacgagacagtggtagtagtgccaccagcaccacccttagtacctccgttctggctggcatagccgggagcgacctaattcggagtgacgttagagtgttgatcgtatggtacctgagcgaatcgtgcattgatactcacatcattgacacttgcgcgctttcccagattgctggttgcagtaggagctcccagtgcaaggctggacaagcagccgagcagagaaactgccatcaagttgaaaggggccatcatgaatagaaaaagaaatcttaaggaatgaataggcggactgggtctccagtatgctttgctggagtaagtgagtgttgatatcagagcattgagagtatataacgatgaccgaaggggtttatatatgtaccacccgatagctctactaggctataggagcttctgaaacacgtcacatccaccaccatcctgatcgttgaagaatttcccgtgctggataatctcttccagtccggccgaaccgaagatttaccgagatgtatacgacggcattaattctccgacgcgtgaagtatcagattgatactcccaggacctcctttgtgaaagccaagatcacatcatgtttcctctaagacacaaagcttggcatggattgatcgaagtcctaaatctggaacggacttgaaccgtttggggccaagtccggacaacccgtgtacaccctactggatggagccccttcgaatggagaacagtcgtcagcgatgagctgcttgttgatttattcgctgtgccttctcaccggaagaattccacaaatggtttgaaacatcaggagttcttgccaagagttccggggtttcaacaggatctcccgatcttggcatcagaagcgtcaagggggaagttatatttccatcaatcgtcaatcgacgagtttcggggtatacgccttaattcttttattggagttcagagttgaccaggggaaattagcgctaggattcttttgggatgttggtggagggttcaacaatacgagtaaatggcgtgatcgcgttggttaatgaaatctttgacaacctcaacgtccagatcttcagatcttccacatatccaacttagcccaaataagccctgggactctatagactatttctcatccaagttattcccggggttatctggtaagtaacggtctcgcggctgagtaatcgctgttcttggatttgcggggaaagcgaactgcgatcaaaaccacctcacttgatcgcaataggcggaatgacagagacattttcatccgtgccgatcgtcgacttcgctcggctaaacgatccttcaacgaaagatgaggagctgtcaaatttgcgtcaagccatcttcgttgttggattcctatacttgaccaacacaggattagaggtgcgagcgatcaatgcgagtgaccgaaatatgctaataattgagatagagcttaattaaacgtacccatgaaaatctacccaaactatttgccctatcggccgaggccaaggagaaatgcaacatgattaactcgccatcgtttcttggctatactcgcctcggtgccgagaccactgcaaaacaaacagacctccgcgaggtgagactatttcttttcggaacctggtgcagttctcgggcactgattttccgattttagcaatttgacttcggtacccctggcgtgagaccctggacagagcaggaccccttttggcaacggcttgaagggcctaatcaggtaggttgccctctttgaacgcatgccctgacgactcactctcaatagtacccagattatccaggcgtgcaagatctggtcgaagaatatatcgcgaagactgatagcctggcacaggcattcgtgcgcctcgtcgcagaatgcttgtccctgccccgggagacatttgatggcttcaagggtaatatgagccggctaaagtttgtcaaatacccacccgcagtgcaaagctcccagggtgttggccctcacaaggactcggcgggtcttttcacatttctgtcccaggacaacacaggaggactccaggtactcaacaagaacggagaatggattaacgtgcctcccattgagggaagtcttgtcgtaaatatccaacagggattcgaagcgatcactggagggatttgcgcagccacaacacaccgggttattgtatgttcacaataccattcatcactggaggacctttctaacatcttgctattcctaggcgcccacttctcagacgcgttatagcatcccgttcttccagggtgtgagactagacttgacgctaaatcagctgaaggaatccgctgctcacatcgtgcaacgcattccagcctctgacgacaagaagaagcgagcagttgatgtgcctagtgaattcctttctcctttgtattcttgcgtgagtggttttgttcaacgattatacgcatgggactaacggatcatagttcggcgaggctcacttgagaaatcgcatcctgagccatccggacgtcggccaacggtggtattcagagttgtatgcaaagtattctcagcaggtcctacaatagtctagggaattgaacgttgacaatcccgacacggtaaaacattgaattggggtttcaacgttaaccctgactttggggaattgccatatcctcgcctacggctttctctgcgtacaaagttcgtgttgtatcgtagtccaggctgctttcagtcaatggaatttagcattcttatttttcttcctggttctattccaaatataccaattgagggctgtctatatggtggaagtgaagtatatgaacatgggcttctattcaagctttaccacagtatcacctttgcaagaattatgcctagacaaaggctataatatcgtgtgaatcaaaatcctggtatacgtttctgcgcaaatttgaagcaaaatacaaaataagccaatctttcgaagcaatgtgcgaattcttaccgacttcagttttatcctcgctttgtgtaaccgcggggtaaatcttcgtgcccaattcttccactttcatgttccaaccatgcccgaaatgaatgctacagcactcgacgctctccggagccgtctaaagactgcgactatctatacacctgaatcagagggttacaaagacgttttagtccgctggtcgaatactggaatgaaatatgcggtacggaaggaacataaaacataacaaacaagatgaccgactgataagttgcagggcgttgtaatccaacccattgacacgcttgatatctcgatcgcgctgtcctgggcacaacagtacgatgttgatcttgctgtgaaaggtggaggccattcaacggccggcacaagttcgagcgatggtggcctggtcattgatctgtcgcgcatgaaccaagtgacggtggatactgagcggaagaccatcaccgcccagggtggagcaacctggaaggaagtcgacgaagccggtgcagtccacagtctggcggccgtagggggcaccgtaaatcacaccggcgttggaggacttactctgggaggtggctatggctggctgagcggacagtatggtcttactattgacaatctcttgtcagccacagtcgttttagccgatggtcgtattgttactgcatctgcgaccgagaacgtcgacttgttttgggggttgcgaggcgcaggctacaactttggcgtcgtggcagacttcacctaccaggcctatgaccagaaggatccagtgtactccggccttcttggattcacttcgggtaagctcgagggagttatggatgcactgaacaattccctggcaaaacccgactctcgctttggtgcgatctgtatctttgccttggcaccagatggatctgggccgatgatcattgtaattggcttctacaacggcccactcgaagaaggccaaaagagattcgctagccttacagctcttgagccagttctgaacactcttgacatggtcccatactccgtggtgaatactctacagaacccccaagcgacctatggtgatcgaaagtctttcaagggaattttctacgagccgccattggatcctcactttgcgagagtgatattcaatgatttcattgccaagatccggagtgaaccagatctcaagacgtctgccatcattctcgaatttgtcgacatgcgcaagatttgtgaagtgccgctgactggaaccgcgctagcaagccgaaatcctactcagaatgggatcatctatttaagatggaccgactcatccaaagatctagagcaccgcacttgggcacgagaagttcagtccaagtggaaagtgaaattggatgccagaaccaaagaccagggtgtggattcgggcgtgcctcagtacatcaactatgcagaacgtgagtctgattgacagaacttgtccctcaatatatactaacatcgtacacagctggtgactcggtggtaagcaatatctacggcgaaaatcttcagagactgcaagaggtgaaagcgaagtacgacccaaagaacgttttccacaaaatgcaaccaattccaatgggcgcagacttgaaaaagtgaaaaaaaacgcggctattggctggcctaatcatttctgagacatttccgaacaatctctgtattatctttggtatctttaccatcctctacgagaggacgcaaagagatgggactgcataagaatggcatatattgtaggaatatacagttttatatacagctaggagcgtcaagagaaacaacttgaaacctagataatacataaaactcaaagccgtggaagaatgtgatacttgacagcctttacagtagtccaaccctcgagagcctcttcgcccatgtctcgaccaaatccactttccttcacacccccaaatggaacattgggactgagcatcgcccacgcgttgacagtcacttgacctgaatcgagttccttgatcacacgatgggcgcgattaatattgttggtaaagatggcagcactgaggccatgatgggaatcattggctttgaagataacttcctcctccgttataaacttggcgatactctaatttgtgccttgattagtattcaaagtggcagattcttgcatggaagcttgcttaccgcaactggaccaaagatctcctctcgcatgattgtcgcattatcaccaacgtccacaaaagcagtgttttcaacgaaatatcccctgtcacctatctgctcaccaccaaacagaagcttggctccagattgctttccttgacgaatatagtcaagaattttctcatgctgcgcacggctaacaactggcccctttgtagtggaagcatctaatggattaccggcgactgtcggagcatcagcggcggcttttttaaaagcctcgacaaatcgatcataaatggtggcctgaacgtagatacgggatccagccgcacatatttggccattattggctgtaattccaatacgagtccagaggagtgcattttcaatatcgcagtcgtcaaagacaatagacggccctttgccaccgagttccaggctgaccttctttaggttagttcgcgatgctgcttgcaaaatcttccgccctgcaagcgcactaccagtgaaggcaatcttgcgtacatccatatgttccgacagagcctggccggcgctggcaccctcgccgggaacgatgttcacaacgccaggaggaatctcggcctctttcaccagctctgcaagtctcagggcatatagtggcgataattcagaaggcttgatgatcaagacgttaccagtaaccagagcaggagctagcttccaaatggtgatcatcctaagaacatgttagacgtgaatgagtcgcttggactggtaagcttacagcggagcattccaaggcacaatcgcgccacagacacccaaaggctcgcgatgggtataggcaatgccaccttccatctcaagggtcttaccatcgatctttcctgcccagcccgcgtagtatcgcaggcagccgaccgcctgagggatgttcattccgattgaatcggtatacagaacgcctgcatcaacggcttccagggatgccagatcttccgcatcgcgctcgaccagctctgcaagtttgagcaatagctgggctttgacaggtccgggcactgttctccacgttttgaaggccgacttggcggattccacagccttgttgatatcctcaaggcccgcggcggagattgttccaagttggttgccggttgatggattttccacaactagcgtttgaccggcagaggagggaacaaattcattgtggataaagagtcccgtcggaactgagagggttagcaactgttgcatctagggccaatatagacttacttgtaatttgacggccctggacgcccgtgacagtcaaactagaagacatttttattgtcaacgaatactagattcgcaacttctgtcatagcgcagactttcagatgacttttgtatctgatctcctcggaacgttccgtcccgcggaaccgtcctcgacccggcccgaggtatgtggagaccgatccccaaaagaggggataatgggttgttgggagtgatagtattctgattcagatcctcgagattgaggagagaaattacaattactgaaggccacctctaaggtattccctttgtgtgcaatctgtgggtgtgctttatcttctaattgagcgtaaactagagagggcggaaagccagaaacgtgacattctcgcgtgtgtaattatcgaaacgaagcatcgtagcatcattccccaatccgaccggactcatcctatgtatcgtttttttttttcgaaggtggcaactgaatagtaaccgtaatggacgaagataaacgatgcaagactggcctatattcgatttatccgtttaatattaccatactgacattcctgacccctgagtgaagtcttaccttgataacccaaagactggacggaggaactcacaattatgtcatctacttagctttccaaaaggcccatgctaagacgagcaagcccttgataccggccgataaccaaagaataggagaaatggctccggtgaccttggtgacccatccgccgacgatggcgcccacaagcgtcaacacaaacgcgatgattcgccggtcgcgtttcacattcctcacaagaaacagttgagggtccgacattagatcgcagagaagactggtaatcaccacggtcggcatctcattgaatcccaatgcacggctcgctacgatttgaccggcagactggagactaagaagaacaatggggatttcctgatcccatgggggtattgtctccgatcctttgccggctagcgtgctagaaacggcacctccttgaacaagcccagctgtaagcaggattatactagcctgtaacaggaaagacagcatcagcgaccctcgccgccgagcacctaggatgcgatgtagacgtgcgaaaatgaaggatccaaggatgaaacagccgatggacgtgagtgagcgtgcccagccatatggacgaaggttttggtgcgatgcacccagcccgacgaagatcgtattccctacataccactatgattagtcgaccctggcttggatgggtgacgttgtaatcttacctgtttgcatagacacaaaagtgttgtaggctatacatgttagatattccgcagttcaataaacggacctggtcttgttcctacctctatatatcgtgctatccacaagtcccgaagtcaaacaacaagcgaaaagtaagaggtcagcatgctgtggctcgagctcagccttcagagatgttgaaagtccaccgaatgcacctttgtcatggttcatcttggatgttattgactatagtgagagagaaatgaagggaaggatgaaaagacaaggagatacaggaaaccatcggaataaaatataattgacataaaaactttctcttttccgcggggattgaaggacgggtaaataaactatgagatctcccaacatttccttcccctcctctcccctggtcaatcgcatcatcatctcacttaattgatgcatcctaagacggagccaaggggcagtgaaaacccccgaagttccgttgaattctgaggaatctgcaggactcgaagcgagataaggacagccacaatcacatgtcgtgcatgacagcctgaaattcctgttagacgggccgcagaccaagccgacttcatactaatttagtctccgatgcatgcctaggatgccaaggaggacccggtgtgatgagcgttagttgcttggcggcaactttcttctccaaaattccatctgcaggcaggactcgtgtaacatgagttctcatggaggggttgatgtacgacccgctatccattatccccaattcttgtggtagccaagcgtctcaggggtttcagacacagctttccgataggaccataccagagacgtcgaggccaagacggacggatcaatggtgcatattgctgcagggcaagcccagcaatcaaccctccagctcagccttgagcacatcaatatccaattctgccataaccccaagcacgacacccagactctccataaatccattgacagaaacgcgcagcatccggttggtcgtcgccatgtatgttattttcaagacggttttacactcgtcagggtcctgtttttgcttcttctcttgcggctcggatggtgcttcgaccaccggagttccgagtgtgaaagtccgtcgcacaaaaggggatagttcggcgtcaacttccaaagcgcgcagagcgcatgatgcgagatgattgcttggaaggggaagggatattgtgctgagtcaagaggtgagtattgcttggtcttgtttttttgggagctatttcggggtggcggggggcttacagtgagtaagggaagtcgggattggtgggttgtatgagagccatgataagcgtaattcagttgggaaaagcgaaagaaaatagtccttctgaattccaaattgcgtcttccaagcagcagggatagatcagttattggagtggtgaggatgatagggtggaaattggcgatgcactcggagtcctagaggaggaattccggggggggaaatttacatggctgactcagctccacggcgaaagccgaaaggagaagtcttaacttacctaccttggcatttggtgtacacactgcacaacagtacgcgtggattcgctacacagcactacaatagcaccttttggtatgttttcgggtgatgatcttctagtttgaagagcttggcgaaccacggtctttgtggaacggtgcatttggccaagaaatcatttggccaagagacggtgacccgatatcgcggtgcagatctctcctgtgagaaggatgcaaaatgcactgcatcactttgcaatatgcagtcaccttgccaaggtgctcggattgattaaattgatgtgagaagcaagccatctgagtcaagattgtgggtcgagtttcccgtcgtcagcctatcccagtcaagctcaaaagcccgaagtagacatgcattatctagatcttggctctctatacggagatatatgtatgcaacgctattgtggctctttgattgatgggaaatatgaacacctgctccgcgactagcgctcttaatcttgcgcaatatgtcttcttcgtggactcactcagctgaggtcatccaggatcagtacgacgcgaaggaagataagccatcaggacgtcttggcagatggtggaatgttacatccctaaggaaccaagacttttgcctttggtgagatgtttttgtcctctacgagcaggcagacgcttctcttctgggattggtgtctgcatgtagcaaaattacttgcagggtatagaactcgaaaatataaagagcagcgttgtccttcgactgtagtacaagaatccaacggtccagactcaaacacatctcatttgccaaagttcaaacatgactatcacaatcaccgtcgagaaggatggatactacgaggtcaatgggacccgacaggaacctactgtctctctctatgtgattcccgcagcttccaagttgcgccgcatgctgaaagacaccaaagacctcatcgtgtgtcctggagtatatgatggcctctcggctcgcattgctatgcaggtcggctttaagggactgtacatggtaagaactctgatgtgtaacaccacatccctgtataatgtatgctgaccaaactacatagactggtgctggaactactgcatcgcgcctgggcatggctgatctcggcctggctcagctccacgacatgaagaccaacgctgaaatgattgcaaacttggatccatttggacctccattgattgcagacatggatactggctatggaggttagtgactcaggaacactagacctttatcatttagttgaaaagcattctaactctctttcaggtcctttgatggtgtcaaaatctgtgcagcaatacatccaggcaggcgtggctggcttccacatcgaagatcagatccaaaacaaacgttgcggtcatctcaatggcaaaaaagtcgttagcctggatgaatacataatgcgaattcgtgcagccaagctgaccaaggatcgtttgcactcggatattgttctgattgcacgaaccgacgcactccagcaacatggctacgatgagtgtattcgtcgactgaaggctgccagggatattggcgcggatgtcggactacttgagggttttacttcaaaagagcaggcccggcaagcagttcaggatctggcaccttggcctcttcttctcaacatggtggagaatggagctagtcctctcattaccacaaaggaggcggaggaaatgggcttcagaattatgatcttttcattcgccacgatcaccccagcttacatgggaatcaaagccactttggagcgcctcaaggcagacggagtggtcggtgtacccgaaggattaggaccacgaacaatcttcgaggtctgtgggttgatggattccatgaaggttgacacagaatccggaaacgacggttttgctgaaggggtctagtaactatttagtaactagtatggatatatgcatgattttgcatcggacaagcaacggagtttctatagctagatattcaaattggaagcaatggtcgtaatatataattccccgcataagccaagatcattctaaatctcaatcaagtctgggttgccttcataggattccatgtcatcgaccatttcaactgaagggatcactggtggaatctttttcacaatctccttttcaattgtcgaccattcgcctttttcaacgattttatataatccaggccaaaggctggcctgaacaaatccatccgaggtatcctcctctgtgagggttcgcatcttcttaccccggaaccgcaatccgtattggtaactaccccagaaaacgtatttgtcttcctggcaatctaatttatgtttgaacttgatgcagcgcgcgattatgccgtgtagctgttgcattcgctttagtctctcggtgacggcgtagcgaccgaagcaggcctctgccttctcgatgatccaattacactgttcttgtaaactagaggtttccaatgataggattgcagagctcatcgcacatcgccaatgtcgggaaatgtggctagaaactgttgttgttagaaagcgacgacagtagtgatcctccggggctcacattgtttatttatttcggaatcgactttgcggagataattactccaactttgctcagctccaagcataaattggttccaaaagaaccggtaaatcagcccggcaatttccgactgaataacatccaatgacgagatgtcaaggctatctgatcttggcgtgggatcgttcccttgttgggctggctttgctgcaaagtgggtaaacctccagtgctcaagatcgtgatagagtagacacatctcttgtttggcttcttcatcagagaaagtctcagtcccagcttgtaggcttgctatcttggtcatgaggattcggttctcctttctggctacatttgattcccggatggcattgtcgagcagctcgcctctttgacgagcctgctcctctgcaagcagccgatctcgttcaaacgtctctgctttattttctgcgattttgattcgctgttttgttcgttagataaaaataaggtagaggggccttgaccacaaacctctaggagccgttcaacctcatcacgcatggacttattatctaggtaagctaatccatttagtagataccatttaagtcgtgacggggaaagcgaaccaatagcaacctgtccccatttggaggataaatctggggacgtttgagtactcctgttcgcctgctcaggcttgggttcgtcgaaagggggccacattgcataccgatagccaagtgatgggaagtatgaaatcataaatggaatagtttcaattctattcatgacacattctccaaatcgatgacaccacaattagccgatgttgtagacatatgcctcacgccgacgctctttacggctaagcgtaggagtcaatgatctcaaagttgcgaaatctaactttcgattgaagaaacatcaccttgtctgttaaaaaaaattccatcttgtactctattttccgaaatttgataagaaagacaagacgtacaaattcaacatggcgatcgcagatgagcgaccaaaactcatagtgggtgttgacttcggaacaacattcagcgggtcagtaaactttctgttctggtagtaattaatgaagcgctgacatcatttttatagcgttgcctggggattggaagactgccctgatgatattgagctcattcagacatggccaggtggtggcaacagtgagtctacgggacaaaagagaagttcatgaaactgactgttcaatagtcacaagccagaaagtcccaacattgtgttcctacgacgacagccgaatgcaatggggttatcagactaaccggtcaattcatccgggcaaggagcagcgactcattcaaggagtcaagctcttgctagatgaaagtcaaaaattccgctacgcacctgctgctgactctcatgaaatcatcaaggacatgaaaaaaacaccaacggaggttgctggtgactacctgggaaaattagtcggccacgctcatgatgtcttgacgcgtcgctttggtactgccctgcaaactatggacttagaatacatccttactgtccccgctgtttggtctgataaagctaaagatcttactatgcaggcagctcaacaggctggcatatctgctgcgaatttgagactcttgtctgaaccggaggcggctgcagtctgtgcaattcggacaattcaaccgaatacaatcgcagtatggatctcatcataatgaattggagtttaataatctgataagattctaggaagatgactgcttgattgtctgtgatgctgggggtggaacggtcgtgagtctttctcgtatggaactggtttgataaattttagtgacactcatcttaggacataatcacctatcgcgtcaaacagagcgacccgttgacattcgaggaagccacaaagggaactggtatttatgggaaatgtacacttttggttatatctaacaaattctaggtgctgtttgtggctcagtgatgttagacgagagatttgacgcacttatcaaaagcatcatcgagaagcagttgcataaaccgctcccccagtctactgccagggctgcacgaaagtattggcaagactacatcaagcctgggtatacaggtcctctcgacgacgatgagatgtgtgacgtaggatattgggtcccagttcctggagtatcgggtatctcaaatatcgagctcagtgaggggcatttatatctagacaggtatattggatatatatatttacttcaccaacccattcgtgggccacactaattcggatacagagatcaagtgaaaggcatcttcgatcctatcatcaagcagattgagaatctcgtcgccgagcaaagaacgagcgtcaaggtagcaggtctttcgacgaaggtgagaccctaaagcgctatcaaaagaagctcaattaattccaattaggctattattctggtcgggggccttggtgcctcggggtatctcttcaagcgtctacaggctgctttcaacgacattcaaatcatgcagcccccaaatgcgtgagttctcaatctttcaaaaagtcaattcaaaacgatactgatataaaaacaggtggtctgctgttgttcggtacgtatctgaaacattcataacgcttgttttgtatctgacagctcaggggcgcggtcatccgtggacaagaagggaatcaagtagagacccgcattgcccgatgcagctatggaatttcaatgaaaatcaagtttaaccccgaaatacaccgcgcagatgagaatctcatgtggtgtccatatgaagaagtatcgcaagtgcataagcgcatgagatggtatattctcaaagtgagtaacctgccacatctactgggtatttttgaagagattttgagtgctgacttgagggactttgagggaaaccccgttgccgagagtgagccgataagaatgggcttctaccgtgtggtcggccttgggcaacctttggtatttcaggactcattgcagttttgccaggggaacaaagcccccgaaacgatggattccagtatgtcccgtgtccttatattggcaatatatgaaagcggccttttactaaattgaacaggtgtcgtgaacctgtgtgaagtggaggcagatctgagcagaatcccaagggagctttttacaaagaaaacgaactccaaaggtaacgaattttaccacatcgactatgatttggttctaacgccaacttccgcatcgttgttgttcgacctgcaattcaacggtgtctcctacgggagcgtgagatctcgctattgaattccacaacggtgggctaggaaaggtatgtttagggtagctgatttgaaagggacttttgcctatgataaaacgtggctatggttttcgcaggctcaatacttgatcgcttgagattggctcgatgacataattgagaggaccgaaataaatagttagctagcaatgcaaacttgatatgcgccttccttgtgatgaagtgtagataaaaatgtgtattgaagaggattcaagtaagtccaacaacgcaggctgctgcagacgaaattcgaagtcaaccttccctgctaccctgaaaaacagccaagtgttgcaagcccgggccttccaaaatatccaagggggccacaaaagccatctgactccatgagaaatttttattctttccgccatagataaacacttcaaagcggccgacaaagtcaccatccacccacacgcgacttccatatatctcatttgtagagatagtgacttgtgatttgcgagggattatgacagtcttgtgggttgacgtggtcttattaacccaaattcttccaggctggtcttcgtcaaaaccgtcagcctcagcaacagagcgaagtgggtatggccatccatcagaaacaaaagccaattcaccgtccgatgataacgtaagtgttgcatcggaggactgcaaagaaaaaggacccgtgacgtttagttgaagggtataatccatgcccttacttccatagccgaggttatgcttatcctggctggtagttggccttgtccatgaaagcaaagttcctgatccgtgggccctttctcccggaaggcggcggtcgagattttgccccacagcttgagaggacaattgtgcgatggatttggccaaggttggttcatgcaagggaggcccacgcgcaccacaccacactcgcgaagccacgactgggatgccatcacgaatggcatagtaggcctcaagctgagtagtggcatccgggccactgtcattccaggcagccaagagagcacctagtacagcttcggtatcgggttgttcagttttgttcaccggattgaagagcccaggggtccactgccatccgtgctggtcggcgaagttcagaacacgggcgttgttgaaaaactgaggataaggggctggggtgataggcacatggttgcttttcagcgacatatatgcccaccaatcctcggagttgatgatctggtagccgttttgggctaggtcaactggatctgattgtccatactgccagtgttgaattgtcacattcttgtcaatgggaatgtttgatggctcatatgtcccccaaatacgaacacttttgccagaagctgcttgtacaaagcgagacatctcgttcacgaactcaacatagtcatccgcaaattcagagtcgtactcatcggcaccgatatgcacctcctttgtgtggaaccaaggaagaaattcggtccagatggacttcatcaaaggaacagtgtccggatgcgagagattgagcaggtccctcgactctaacgcgagctcaggtctccatttcgtaactgtgagacagtgcccggggctttcgatctccggtatcactgtaacacctcgctgagcacaatgacgctggaaatcatcaaactcagcccgggatagcgtttcgttggcacgctggacaagagggcggagggcctcactttcggggtgcaaggaaaactgcgagtagacctcgttccaggtcacgtttcgaccgcggctcagcggatagttgtcggtcgcatggtagtgaaactcggataatttgaagaacgaggcgtaggtgcataaatctttcaaaaactcgagtgaataccatttgcgaccagcatctagcaaaaatccacgagtcgcataggcgggtgcatcttccacgcgaccaggctgtagggatgagcgtgtcaaaacgagttgctggaggagcgttcgcgttccccaccacatacctcgcgccccggagcctcgaataaatacactgccatcttgtatttccagctcatatccctcctcggtctggcgtccactttcgtacgtaaaccggtcgggatggtctgtgcgcccgagaaatattcccgacgcatgtttgggaaattgcttgaccgtccgaagctcccaggaactgttcgttagctcctgtaaatcatcgcgaaacgtgttggcaaagtcggatgccgatggtggaagcagcgttaatccattctgatccttccagctagcgaagtcggcacttaggtagattgttcggtcggtggttgctaacgaaaagcctttgttatgaccagagccagtgttgtcaaagtgcaccgggggtaggatctgcagcgcagacgcgactgcggcaagtgagaggacaatccacttcatgtctggacattgtgatattggttacgatgtgagcccttttatgcaaagcaagggattgtatcagcgttacattcctgattgtacaggggcgtgggggtagatgttgtggggaggtggggaatttttatattggcagagtggttgttgtggatatcctacttatttttcatcttggggtatagataagaaggttgcattaaaaaacttaattgactattctttctttcctgtcatggtaactcgaagcatgaaatcacgcctcgtcgaagccatgctgaggccgagttttcatctattgattctcaatggcatatgatgcctgtttcttactttttattagtatagatagatctcttttgaccacttagactccctgtttccaagttagagaattacaagaatggcctcgttatgtcattttggtagtcttttagttagtcttcttaaaatatactaatcttcttggtacacgggacgggaaagggctaaatttgtgaacctttcctaggtatgtataaccttagatatgtggtcaatatctctttctgatccttttctattccagccgttgggtgctactgctaaatagtcccacaatagcctgctgacagcttttcagatgtttaatcgtattcaaccctcctcgatttctaagggcagtttccaaccacacacaggcccatgtcatattccataactcgttcaggagaactcatatcaaatttgcactcgttacacctcactccgtatttcctcttctttcattcttccatcaagaactcgcgttttctacgtagctcacgacaatctcattaccacaacgaaaccgaatacacataaaaccgcatcaggccgacagaaataagtcaagtgagtcttagagttcaacggtgcttttgaatatgagtgtggttgttttcgtcaacagtttcctttagtagttgggcaaaatatccaaagtcagtgtctacgttgaatttcttccagggactctcggtttatatgggtattacaatggtagcaaagatactagagctcctcggaggggactacggggactctcgattagggcacattggggatatgtcacccttgaggtcactgattagcagtcgtaggacgggtttctcacgaaccacatcgatagccctagcagtctctaacttgcggtcatttatcggccactatgattgttctagcatggagtttggaccaaaatatccgtagaacgttcgacctcagttgactaggcaacgggccaagcgttgctccggatggatgaaacaaaatacgccctgatatcgtttcttttaagccgcgttggatacctactgttggtatagaaattttttaccttagtccatcccgccatttttaactctgatgctgttgttagaacatttgagatgtgcaagcatacacgaattgggcttcatccatccagcggagaaatcactagagacttctctttctgtctggaaaccaagatatggtttgcaagccgagcctccaaaccccaccgccaaccactgagaggatatagaaccttccccgtatgcggttactaaccagcttgggtcggcgatggaagatcttcaagcgcagggtgcctaagttatactaactccgttatctccccctcaccccgacatcaaagaaacggatatcataaacattaccaggtatgatttctttccatgatattcgccgaattatcagtgaactcccactaataggcaccttttcactcatcttcaggctcatgtcattttggtcaggcctcagccggcaatttatttatgcggcgatacctaaaagcctaggtctagacactgcgcagggccaacacgagaaattattgtatgtaatgcaagcatttccccgatgattcctccgacaacgaactttgggaatcattaatcaactgacacaattccttggcgagtgttacctttacagacggactattgttgcagcaagggcggaaagtaggtgtatctgtatccaagacatcaggaattctcggtagggatcgacaaggatcgactctacgccgaggaccatagaggaccttctcagagtggcgcagccttagcggtacatattttgcgctatcccttcaatgaacggggcctggggtaccccagctaattatttaaaattattagagttaagatctccctttcaagataaaaagttggcacacagccgtgacaacatccaactgagggaaagcctcgtggcatcggaatccccacttaacctttcacccttgccgtcgggccttatttttcaaagatggcgaataccaagactgtgagctgaactacacacctagtcatacctcctgtgtgttacaatatgttgcatctattcaaacctagacagtatcttcctatgcggtgaaacattcgactagatcatgacgacctaatggatcatcgaaagagcctaatatccacttatcagcaattgaagtatactgttcaactgcatccttgatctacgatgatcaggtggtgatgtcatactcacagcaaggacaatagttaaacgtggtttcaagccaaaacaccgcccagttggcgggctggccaattggaggtaaacgaatgacatccacttggcattatcatgtattgttagcggctccatgaaaagactgattttttttggctgaagataacaacagcaaggggagaatgtctcacaccttggcatataatattgctttttcgaatgcaaacatgtggttttattctccatttcctttttgtggatctcaacttctgacggccatgaaacctcccaatgtgatcgctattgcacttctcctttttgagttgggcgtatattcctgcagcccacatatccattacaaggagaatatgccaagattggacccgtcagcaccaggcagtgcctgagctgcggtttagtcaacgtacaacatacggggtacggtatggaggatcaaccttgtgagcgccaagatctagtattcgaggctgtgttatgagaacttagtcgttggcgtgcacagataagactagtggtgaaccattgatgccgccggagatcgttcttggcgactagtcctactgcagcgcttttggggccccggacggactagtgtcggtggatacgtcgatcccttggcaatcgaagtgtacccttttgacgttttcaggggccagaacagacaatatgtactctctaagacgccatctcaaccaggtaattgcatatcaagccgagaatcatagggcaggtgagtttaaataatccgatgacaggtcgcaatggtcccaaatttaaattcggtcgattgccgcgcgctgattctgcacatgtagccagtcaatgccataacgcataaccatgctgccaagaaagaatgtgaggaaatgctgcggattgctccttggaatcgagaaatcctaggaatcaggtcttgacggattccgccaggccacggtagatcctgaacccgcaccgtctaatgtcgtattatagtttgatttataatgggatctggggttgaattacgcatgcagcggagataattatagtgccaagataacgcccagattctgctaacatggatctgtgagatcatctcgttttgggatgatcatttctattgtggctactcactttataagactacgcatgcgatatgatttggttatacagtaatcgatgttatagtgatcgcatacacacagtgtatgtcgaatgaagagagaactagatctagattaagtagttcggttcccaatgtatccctctgcggtgtactccgtaacacataaacgagacgcgtagggatggggcaagtatcagtgtttcatctcaattttcttatctctcttggcgaggattcagcttattctcttcatggagaggatcggaatggatccgaaagatggatgagtattaaagaaagccaaatccgttgtgccattgtggcaatctatttctttccatattggcacagctacctttcaatcttgattctattcataataaacttatccggcttgaataatatatgcataataataatttgaacatgcatcgccagccgccttcctcgtcgggatatatcgagccactcacaacaccagcccaccgtgcccctgaccatcgttctatctaccaaacagaattaacagctgcaaattctcgttcggagaaccccaatgaagatttcaagtatacacagggtatttggtcttctgggggcagcacggcagtgtctgtctctggcaatcagacaccagaagacaacacggtttgctcaactatttcccgccacttccgagcagacatagacactacgcatacagatattcctcttatagtatgtggatttgttggtggcttggtagatggcctatcattcaatgcatggggcagcttctcaagtatgcaaacaggtatgtgaattctatagtcactgttttcccgtgcaaagcccgtaaagctaatgacaaacaacacaggaaataccatcttcttggccttgggagtctctggtcagcccacaaccccagcatatctgtgggcgaagtccctaattgccctggccgtcttccttgcaagcaacatcttattcgttcacatgcatcggctcttgaggccacgtcgccgctcgactatgataatctcatttggtattcagactattgcgcttttggccacagcaattcttatccagctggagatcatcaccccgaagcccgaggacccccgggctccgatcgaatggatgcaagtcctggcaatctcacttctagctttccaagcaggaggccagatctgtgcttctcggatcctggccctagatgaaatcccaactgttgttgtgacagctctgctatgcgatcttcttgtcgatccaaagctgactgcaaaattcaatccgaagcgcaaccgtcgagtcggggcctttctcgcattgtttttgggcgccatgaccgcgggtggactttctaagaccacgagtatggcgtctagtatatggcttgccatgggtctgaagttgacagttaccttggggtggattgtttggcgaggggaggggaggagaaagagtgattttgaggtgtgacttggctttgtttctttttacgtcgcctattcaaaaggcatgtacacgagcccatgaaagtttcaagtaactctttgtttgctttgttgaaatacccagttattttccgtcacctatcacctcaattcgttcgtcttctgtagctttcccacctttcaattttagtatctgatcgaaccactgagcacatgcgtagtattatatcgctcttgcttcccatcaacctcgttatcgcagactttactattgcgagacttgccgtccacagcacctgcttgcaagatctcacacaaacagctcgccagaccatcggagtcaaatccccgtcatttgtccttatcactccagcaagccaagtacagcagtagcatcttacaaccccgcgctcaaataattacctaaaagctcgcccatcagctagtctctcagtatctgcggcccagtctagcatgtcgtccacttcaaggtcaccaaccagcatcatactcggaagaggtttttaaatgtcgactccgacagggcaagaaatacagaacctagaagttttagtattatcactctttttcaatttttgattacctagcatatgtaataaagttatatatttaatccatattcgagttttagaatatacttcagggagccctctaataatattgtaattcaaaatttcaacctataagaatatcgactctgaaggcgtccataaaacttacccttcaactatataaaatcatttgcatgaatattagtgctatccttgacatgaaagatcctagtataatatagtcgatcgatgagcatttcagacaattcttgttttatatttaacatgatattgtgtaccatatctcgtacataatcagacatagcgcagaaatatatcgttgtttccacaagttcctgtggtatgataaggatgtataatcgaaatctagtctatgattttataagatgactattctaccggtacctgacagtacctttttttatttgctctcatccgagagaacgaagtggagaactccgggctgtccactggcgcgacccttgctctcggagacatagatgcacttgcggaaggtaaccatcaaggaatataagaagctctcatccttctgctcgtggtagttttcaccgagcataggctggatggccttggtggctttctctgcattgtagaacggaatgcggctgaagaggtggtggaccacatggtaatcaatgatttcatggaagaagtgacggccaatgaagccggtcgtgcggtcaatggtagccagtgctcccttggtgtaagtccaggcttcggcagtgtagtgagcaacctcggggtgggtgtgttggaggtatgtgatggcaactattgatttgattagttctcattctaggatctcaggtaagatgggaatgaaagacgtactcagccagtgatgaacccagagatatggcacaacgtagaggaagaagacattccacgctccgatgatagttccagtgtaccacacgatagagcccatgatcagcaagccgatgtcggagtaggcaatgagcttccactgagcggccgtgaaaattgcgctcgatgggttgtaatggctctcaaacttcaccttctcgcttccatccgggccactcttggtaccggcagtcacgttcaggatgagatacatctgccatcccaacaattggtgtccgataagttggacaaatgagacaatgggtgtctcctcggcaaggtgcttcaactgctcaacgctaacatttctcttcgacgccaaatcatcctcggtccaggggacaaagacggtgtccttttccatgtgaccagtgtagcggtggtgacgagcgtgtgtgatcttccatgagaagtatggaaccatcaggaaggagtgtgtagcccagccaatgaaatcattgatcccttggtgctttgagaaggcaccgtggccacattcgtgagcaagaatccatagtcctgtgccaacacagccttggaagaacccatacacggcccaggcaacaattcgcataggcagagaagggagaaggtggatatggagggcagcgtaaatcagagctgcacaatagatagaatctcgaaggaggtagaggagggaggttgtgagggacgattcaaaacattccttcgggattgcatctttgagggattgcaagctgggaatatccgtctgctgtaggactggaagattagcacatgtgcactgtttattggaatgatctggcgttataccatacctgttctgcctgtttgacaggctgcctttgtgtcacagccattttgaagcggaaaattgaagatgacagatacaagaaaatatgtagaggactgagagtagttttatttcatctgtcttttattttattttttccctgcccccttcgcccccataaagtatcccctaggctcgaaaaaaatgagctctagattgtcggaactcaaaaaaacattgaccaatcccctttttcgaattcttttccagaacactgtcaaattcggtgcactgacaggggatcagccttctgattgggccatcgtctaacggatggacgcgcttgttccacggattctcattgcactagcctctttctttcttttcaacgtttctggggcccaacggaatttcagtccgctggaacttttgtggccgatacaattaatcaccaaaccgagggcattcattgaatccaatatcggatactaccccatgcgagaacccctacggcaaaatccaaaccattcgggccctaggatatttcggcgtttgccctccaaggctatccaccgcgcgggaagtctcgtacacccctttttcgacctcggtagaatctagggatccactaataagcaaaggttgggaaaaaataaagagaaaaacttaataaagggcttggcagttctcgcgttgtcctactggctctgtcaggggcaggagaaacagcactgccttcgatcgcaaaaagcgtaagcactctttgatcatcctaatgacttgtctgaaaattgattaaggaagctcgggatttttcaccaaacgatagggcatgatcagcacttcggctattggaggaaatgtattggactctattttaagcttatttttgtataacgttagacaaacccgtacctaactaggcatcgcttgtaatgtacacggactctctgattgatgacagatgcgacgtgcaatttgctcaatgatcatgattaacaatgagccctcatttttgcgaacatttgcccaatcgtgacgctaccaagaatacgtgtcatttcactcgggggtcgctctggtccgatactttcagctgtagagcattttaattgtccatatcgtgtatgagccctgagcctaggcaagcctccagagttctttatcgcctttttcaatactccataccccgtacttaccttatttaaagttaagttttgaaggcctcggtagggaggagatcggagtaagaacacacgtgatagaattagcacaccgccctcgtgtcttcggacaactcccggttgaatataatgatagcgtcccacaacaaacgaattccatgtgcatgacccatgggattgcaaaactacctggactatctaccttcctctttacgcctatctgtcgcctgtgtacggagtacaactgtcttcacagccaacatgtcaaggaataattatcagactgatatcacatacatgcacgtgacctagttataagggaaaaaaaatcaacgcttgcttttctcttttttcccctgcaaatatattggccagattttgctctcttatccaatttacctgtggcgacatctacaaactggggttggataatggaagctccgtcgaacacctcgctatcctcaccccaacaagtatccttcaacgtcatatcgagcggtttattccgtatattcaaatctagatttccgtcaaatgcctttccggcatcgcttcccagctaggaatggagcgacaaggagatgcgtgatatgatctggacgcgtgatgttgaatttttgttggcaaaggcgggatctgggtgattttggtggggttgcacggaccatccacattcgagcccgacaatactccacacaaaagacgatttcaccgtacccgaagaggactatgtgttggtcgtgggcgacaatgaaaatcatctccctgatgccaaatgggtgggctatgcatacctccttgatgccataacatcttcgataccgctacgagagcctggatatccttcgctgtcatcatggttcgaaacgattgaactgcgctcgggtgtctccaaaactttgggggtaatgaattgcgcaagaagcatcgaaggtgtcgattaaagaggggttaaaagcttcatcaccgagagagagagaacagcaggagtgcaaagatgttgcaaaagcttccctttacactgagtgtcacgaaatattggaaagaaccaagtgaacttgaatcgagtgtgccaaatgaattttgaaacatctctcatatcatgaagtctcaaattccgtgatccaacttcccctattcgcaatgcgaccccgccattgtttccaatctcgctcggtgaggatttcgtccggcaaccttgaatgtcctccgtatacaccaaaagatacacaatttactagcagggcggatgttgattggatcaaaaatataacaatctcaatttcaaatggcgtcaatgccggcctaaatgcatcttgcaggtagttcccaatgaacaatcaccctgcaacatacagccgtgattccgacacggtggagtattttgacatcatcgcttacttttgtatactacagccacgatttaaaagatgctcgaaccctatcgataagatctctcagacggtaatttgatttttgaaaatattctacacttttaaagacgctctacaagacgacttattgtcatggcgccccggtatcaaagcgttgctgtaatcggcgccggtccatctggtatctctgccgtcaaagctttgcaagaagagaatgttttccagaccatacgtctatttgagcgacggggccacattggaggaatctggcaatacgatgacattcccgatctgtttccatcccaagagtctcctagtcaacaagatcatgaaatcccaggtcgtctcccgctgctcacgtctccttctcccgaagatgtaacgtctcgcacaggcatttacgagggccttgacagcaacgtcggcgcaaaagtcatggcgttcacgcacaccccttttcctgagataaattcggcgtcgtcaactagacacttagggcggtccaatccaacccgaccatttggggtggtgagaaaatacctagaagatttgttccaagactaccttcatcttgcttcgctcaatacaacagttgaaagggttgaaaagcgagaccagaaatggactttgacacttcggcaatccggccacggggatggtaacacccccaaggactattggtgggaagagcaatttgatgctgtgattgttgcatcggggcattatagtgtgccctttgttccgttcgttccagggctaagtgccgctttcgcgcgccatccgaccgtatttgagcactcgaagtcgttccgaaaggcagacgattatgtggacaagcgtgttgtggtcgtcgggggcagcgtctcctcggcggatcttgtcgcggatttacatgccattgtgaaaggccctctcgagctgtcccagagagggaagaacgaggcgctgcaatccgcatgggatctacctaacgtcaatgccagaccaacgatcaaagagatccaagcaacgacaaaggggataagcgtcgtgttctccgacaacacccttttggagggcgtggacaagatcattttcgccactgggtacaagttgtcctatccattccttgttccaaatccagtcaccccaaacaaccgggcagcagggttttaccagcacattttcaagatcggggatccatcgttagctctcgtcggccaggtccgcgctgcgatcagcttccgggtttatgagtaccaggccgttgccgttgcccgatattttgctggtagaaatgcagcatccttgccaacgccacaagagcaggatctttgggaggtccaaagactccaacaaaaaggccatacagccctgttccacgaaatcaagcctgacttcaaggactatttcgatttcttgaccgatttggctggccccccagcaccgggaacggggggttacacactccctccttgggatgatcgatgggcagaacaaggattcgagattctccagcgaaaggataagtattggaagtcactacgaagagcagcagatggattaggggtgactgctaaactgtgaagtcagcattatttaccccgtacattccatggggaggaaaatgtaaatatgtcggtcagcaacaagagcgaacgcagtcgatctgtcactctggattatgtgccattttgaagccaagttagcataattgtggtcgcaataagacagcgagggtttaccatttctatttgcgtgctcagccattctctagttctcaaatgctgttttgcagctttcaaaacaccgcggacgggggtgggactgtccattgcagcatgtcgctcatcttttcccttatgagcaatgaatgcagaaacaggagtttccctttgtagtcaagatgtgaagaacaataagttcgatgctactctgactggccccatccgacggtcttcttgtcgcgcgggccggccaatttcccccataagacttagcgccaaccatggcccaatcacatctcgagaattttacatgggctgtcggtcacgaaaatggttggtcttcgcttaactcgttctatagcagatgattacagcgtgcaatcaaaccatccgcgcaaaacaaagtatataatcatgttactcccaaggctactccgtactccgagataaacatcctagcatctccaagtaatccgccatcatgctcggatttttcccttacggtatactcgccattgcttctgttgcagcagcacgcgatcccactgtctaccttattcgacacggagagaaacccagtgacggaggaaatggattgaatgcacaagggcttgaacgtgcacaatgcctccgcgaagtgttcggcaagaattctgggtataatatcacccatattatggcggaaacgcctaagagcagtatgttttatgtcctctctccatgcagcttcggcacaagggctaacatgaacggcacagatggcaaacgtgcccgtcccctcgacaccgttgagccgctagctgaagacctcggtctcaccgtcgacacatcttgcgaccgtgatgatccgggctgtgtcaaggatgtggttgctggatacgatggcaaaggcttggtcaacatactgatttgctgggagcacgatgcacttacggatattgcggagaaattgggagtcaaggatgcaccatcttatcccgacgataggtcagtcttcaactcatatcatagttcacgctcgacttctctaacataaatatagtttcgacatcatttggaccctcccaggtccttacgacgaaataaccgcggagaccagcgaaaattgccccggtttagatgattgagtaaataatgataaagtctaagtagggttagatgctactaatagctcattctcaatctggcttctgtaggaaggccttaacgggttcttttcattattcctatgcattgattcagttaattcatgcattgttttgtaacgtttacagatggttgagtttttttaagtcgagtgcatgaaattccgcatgtacttgctgcacacttctacttcgaaaattactagtttactacttacggatgatcatttcttatgtgtcatactatgaggaaggacctgagcaaattcgagttttgctatgccacgactctccagtttgcttctactgctatcgtgaccatcttcaaaccattattcattattcatgaatgcgtacaagttattaccatcgccggacaatctgacgacctagcgagcaaggcgtctgatgcgaggaacgcgtcctgtttacatagtgaaaggaccagaaacaagagaggatatatcgcatgtccaagttgaatttgaatttgcaatggtttgagcatagagtagtaaagattgcggttgattcatcttggtattaacaaattatggtttgaacataaacaaaagcatgaggggttgggatcccgttagcatttcgcagttaagacatgttcaggagactgtgggggatggtcaaactcttcggaaatattaagagcaattcatcatattggcaaagcatgtctccacgtggacaaagtaatgattctggttccaattaagaaacacgcggagttaatgtaccaagttatggaggtacctattcgacgtgcgaaatggtgctttccttttcattgggcttgggagcttggacggttccttcctctgcgcggaggtctgccactttgtcggactgaatatctcccttctccagcctgcgaacatgcttatactgcacacttgtcttccagggcgtaagaccgggggtggcaaacatgctttcgacctcctccagggttttaccggctgtttcagggaaggcgaagaagacatggacagtcattgcgaagcaaaagactccaaacaatacatagaccttccatttgatgttttcaaaagcgggagggacgaagtaggaaagggcaaagttaaagatccagttagacgacgttgaaagagcgacagccttgccacgcaggcgaaggggatagagctcagggggatagatccagctgacaggaccccaagttggcgcaaagctggcgacgaaaagataggtgcaagcaatgactgccttggcggcctgaggggacccggagagatcccacgactgttcgggagtattgttgagaccacccggtggggctggtttgccatacgatgccatgatgccagcgttggcaaacatgaacaccatcatgagggtagaaccgaccaaaagcggagtgcgacggccccaacgatcaatgaacaccaaagctagcacagtcatcaccacgttgatgatgtactgaatcgaggatgcgataaggttcgagtttccagtgaggccggccataccgaatacataggtaatataaagcatcatgacgttcataccagtgagctgagaccaaatttgcgtgaacataccgaggtgggttcggtaaatcatattacccttgaaaaggtcaaggtatgaggcatccttgttattgcgctcaaattcgaccatttcacggatctcgtgtaattcggcttgcacgaaaggcgcgtttcggtcacctttggcatggaccgacgccagaacctcaagagattcttcccaacgatccttcttggccaaccaacgtggactttctggcaataggaagacgcagccgaagagcagggcagcgggaaccatctgcaacccccacggagtgcgccatgcagcggtgcccttcaaaaagctacagccgtacgagacgtagaacatgatcaatataccccaagtgatcgcccactgttgtgctcccaccacctgtccacgcttactgggctgggctaactcggcgacatagactggcacttgggcgctgagtataccgacggaaactccgttgataaagcggccaacgacaagctggggtattccaaaagatgaacacacgatggcgctaccaatgcaccagatcactgagccagactggatggccccgcgacgacccagatagtcggttacgaaaccagaagctagggagcccacccaggagccaccaggcatggcagctgagataccaccctgagtggaagaggtagggcctccgcattcattgctatcattggtgccagtttggttgaagaaacacttgtactgctgggtgccgagactgccagagatagtcagtgatcatcagcctcaatctgatatttccaaggaatgggacgccttacatggcggacatagacgcgatatcaaaaccgaatagtgcgccgccgatgacggccaccgcggtgatgacatagatattagttatcttgtaacccataactaatgaagttccacaagagagtctgattaaagatggaggaagaaagtggaagaagggatagagggcaagggcgagagattttaaagatacgatccttaaatgaaatacaataaaaccccgaatgggaaaggagcaaactcaaaaatcctaaaaagaaccctgaaaacgcggagatgcggagatgccgggaaaagtgggttccccggcatactacctgcattatacgaagtagattcccactgctgtacagatgaatatgcaaattaatgccagtgagtagagtcagtagtgtagcggggaaatactatagaaggaaacccgccttttcaacttcgatatgacctgccaaagccaaccttggaagcttccgagtcaccaagtcacggattatcggctggatatcaaattagtttgtggtcagatgctagtgagccccatattatatgtaacattatatgtcacctcaagccacatggtatcatcgcgtcgtcggacatttgcctattttgttcaagggtcgtggtagaaggtccgtggatgagacttgctgtctcctgatttggcctcctttgtctcaagacataaaattcaaaactaactttccgttacagaagactgagcactaatcatcatctcgatgagagccgacacgcgccctgtgctgatgtcgatcttggcttatgaaaggcgggtgatcagacctccttgacaacacaacacgcctctcccgccatgatttggtaacacggcacatgcatgcaacgccctcagagcctgtttgtccgaccaagacactcgtggctatagtacgacccgactagcatgcaggatttacacgatactggaagcaaattccaacgctgattgactggtatatcacactgaaccattcttcccaggagctctgctacgttgaacctccatctcatattctatgctcatagctagtatcgccacattgcggttgtggctggatgattgagtgcgccccctacaaagctgtaattaagacgctaagcccacctttagggctacggttaccagattcaaacacgcggtctcggatcaagatcccgaaacaaaggggctgttttcttacgccaactgctgaccactaagaacgggtcgtttagcactcgactccttcatccctgcgccggccatcaatgacgtgggaagaatccctttggggagctaaaatcgggcggaaacaatgcatcacttcctcccgcctctcccttttgctcgacacatgtctaagaatatggtgcgaatacgttccttaccgaattgaaatcaatgacccgccgtctgctgccgtctgctgccgcctgctgatcccagctcacttattagccagcaagaatatgtgatacacctccacctacctttattacaaggctaagaatccatgcagagtccaggatcaacaatccaaatgggaaactgcgtttaactaactggttgcatcaccccctcaaatttgctagcttcagacttagcctctggtatgatcaatccttcctggctgtctagactgtctatagaaggtttgcaaggtcgtgtctgacgatcagactaccagcgttacatttatatcatgtgtggcttactgttccttgtttttcgtccaaaaaaacagcctggtccatcacgtgacccatctgtatcaaggatggaaaaatgacggttttcatcccagattctgacagtgtttctaagcttgctttgatgttgccacaaccgtgtctgataggatctttatcggtaatcttaaaaatgcaataagcccgaggtgctgccacctcaatttagcgcgacaaatggtctttcattaacataacctcgatctattcgggctatccagtggtattcgcaagttaaattgggaccgtatacggtcagccacgcgaaacgaaagccagctgcaggtcataagtcaaatctggatcgtatgagggtcattacaggatagaagccggctgtaagccgtagtacgttagattcggacggactttgcgtcgtttatgggtagttggtacgatctattagatttgattggactactttgtagtgctgcgatgaaagagggaaagattcttattttccaaggggcagaatgcccgactatctggtacggaaggttggcacgggcgacaagtacccgcagtgggcacatggtgatgtttcctttggtccatggtttcgaaagccttgggccaaagtgtggcattccgccctttgaacgaggtccgccattcgacttcctttgcaatctagttgtataacccccatgcactgtcctttacccattcagtttcgtactggggtttttggaggcctccaagtaagacaatgaaaaccccctcaaacaacttgagatatcctctctcgattggagattttaatgatgcaagaagacgaaattgagcctttacaccttgccataagagacgatatagcggagagttggggtgtgtttcccatagtgagggacttttgtgacggataatccgcactctgattgccacacttgatccaacatatattgaaactgtatttccatgttgatatgtttcagtaataactgagagatagatcccatgttcgtcaattgattgggagggggctgggagcgcgagaaggctttccagtgtgatcatttcatctttaaacacctttaaaaccgacttcggtattgctgtagacactatatcgactagccagtcgataaaaactcggagaaggagacaccagaatcccatagtcataggtcgattccccattttccccaggtttactgattggctccatccttggagcctggtaaggacctggtgaattgtattgagaagtcgtcctcgtggctttagtaaatttgaggtatctggcggaagtaatgtccatgtgtcactgtacaacgtcaggctgcgggactgattcgcaatttgggtcatgggagtctctatgctgaagattgaggggaactccagccattaaattgatggaaacatgatggacttgatgggtgtacataccgagtaagcaggatgagaggttgaagaagagaaagagagaaaggaagcaatttctgtgtatatatatacactcccctctatcaatcccctctatcctaactttgtcttataagttaagagtgagacatgcagttataagtgataggatgcctagattcacaggctcttaataacttactacatttacgaaagactatggttacctgatttctcagtagccacaccatggtgttctcctctctagcactctactactcctagtgactctgctctcacacctgtttcgcaggcagggctgtcggtgcccctgtccctcgtggcagggtccctcttcaatattgagattagaaagtttgtcctccccagatccaagcctcattcgactcatattccttatctgccatatataaattcaactagctcaatgttattctgatggtgagtgaatggtcacatgtcctaggtaatccgccattagacccgtctcgggtggagccttgtagtaccctctgtctccaataaacaaccaaacacagccatctaaacagcagtcaaagataacggtttgcatccaataattgaatgttgaaaaagttaacaatggcatagactctctagggctatatgtataaatgactcgagcaccactcgtgtagcccttgcaggcaatctccacggaggggatggccatcgatcatatacccaaggaggaagagatcgagtctgacaaggttgccttcataaaggggatacccagagatgaaaacattgagtccaacatttgcggacgtggacgtacttcccggtccggaagacaatgaccactttgagggaattcacaccgggggcgatgattcatcaccccagaaatgagaagcaaattgcgagatgtttgtgcactaggagattgtacactatggtgtggtctatgtgatccccatgcttgctagctgaccgtcctgtatggttggtgtcgctgtgttgttctcgtcttgcctgcgtggccaggctgcccatcgtgcatttccctcttcaatatctgaatttctgacgcctgtggcgttggggatcaaaatgcggggtattaccctcccggcgtaccgcctacgtgaccatagctatccgtacatatacatagacatcccggttacagttacgagaatcctcatttcctcaatttcctttattccctccgcgaatctcaaatagagcatcttctctttcagaccatgatccactactcgatgctttgctaccaccttacacattagaatcactggtacatccgcaattaaaaattcccgcccgcgatgaacggatatcttcaatgaaaactgacaaccacattctaccttgggccgaccgcggaggaaaagctgtacgcggtgtcacctccccgcgactgttttcaataacaaacccacgatctgttacacgatgtccaactcataagcacccgctaatggcaatggcccagggtgataacccctgagccatcattcccggtgagtcgctggagcatattcacctagctacacattcaagatatctctgggtccgaatggaaccaatactggataaataagagtgccataagacataatacagcattagaagccggatgtctagggttgaaagatcattgacgaaactggcggcatccgcgggggctaacgtcgaaatgcccgaaagatggcagcgatctgttgatcaacgagggacaccagacattgcattgcgtgtcgctaacatggtttagtctgagagacagagactctgaggttttaacaattttgtttctgcttgccttgctcttgtaggtgcgtccaatgtctcaggtcgatcctccgttctctcggtcaccatcaccgagcccactcgggctgattcaccttcatcatcgtcaatttttatattcccatgcctctcaatatacatttaatatcttcccaatagctactactcgtggcctttattccctctggggcgatgtagataagaaccgtctataccttaaaacatagcgccatgactctatgactaggacaccatcttcagtacagagtatcgtcgcctgcaccaccgtgcacctaggtggctcttgggctgtcaatttctggcgctcgaaccaaacacttcccgccaatccatgggaaattgtagagaacgtaatttccttgggatctgtgatatcgattaatgaatacagtcggaattagaatccgaaaaagcggcaaactttcagacaaacggaattaactcggtttcaagatgtggaaacgataaaactttgtagatccaccgacttcggtatggtgccctagcattggccggataggatcaaagtttgatcttccagaagtccgtaggtggccaaatctgcgataaaaattgatcttgaatacaatacttgagcgttgctttagtccgtaattaatttcgtggttatattcttcgctgtttacccgcggtattcagtttggcttaagttgttgaagttatccgaatgtgctatcatggacttgatacttcctaatgacgtacttctcttgataggagagcagctggaacagagagcagaccgacggaacctcgtctttgtctcccatcactttcacaatcttttcctcccactggtatatcgaaaggcgtccatctaccattggcaaaatgccaattccttcctgcatgcattactgcaacgacctgcgctggcgcgggccgttcgggagctagacataacagactggcatgcaagaagcgtatcggaagatgaatgcaatgaaattcggacttcagcatctttggtggcatggctaggtgctgtgtcatgctcaacgctcgaaagtgatcaatgggcccaaagtctcgggcaaggcctcgctgacgcctggattgcgctcattctcccattgttaagtcagctaaggaagctttcgctggcctatacgtcaaagtctccttatttggatcagatcatgcaaagggctgtggactgcaaacagccattttccgaccagccagccttccggcacctacgcgaggtctcattgcaccaccgggaagatcttgatcacagcgagcacctggaaagtgggactcaactatcatcaactctgctcctgtcatttttccaactgccgtctgttcgtgctatcgcagccaactctgtagtggaccctagctccacaagggaaccgacagattatgagaagccacgccttgccttctcctcaatcactgatattgatttccgagcaagtagtgggaactatggcatggagatattggttagttcatgcgcagaactgaagtcatttaaataccagcactcggactcgcacatcctttcgcatggttaccagccatccgccttccatcggtctttgattcacagcaaaaaaagcttgcaaatactctggctggaccactatggaagccactacccgttcaccgctgctggattgaaccaatcccacgatgagtgctttggctccctcgtcgaattcaccgccttgaaagaagtgcgcgtgagactgccaaatcttctggatattcgataccagaacgaaccaaccgtgcctctcatggagtgtctaccaccgtcacttgagactctgtatattgaaggatgcgaggagcgatatctgggaatgttggtttcccagttacagagcgtggtcaaaatccgacagactcatttccctcgactcaagcgtgtcgatatcgagggtgcattccaaaacatcccgtcggatgacgatggtcaggttgccagctccgaatcagaattacctgctgtgattaaggacaaaatatatcaggctgctgaacctttgcatatagactgcgtcaatgctggtttggagttgcatcttcacgaccgtgcactgtcacatatttgattatctctctctattcattagcgaactccaggcttgcatattccaacatttgatttgacgatagataccatctgaaacctctttttatatagacctgcctcttattattcacgactatttcaatacagactgagaatttgaacttttagatcattggacagacctccgacagacctcccactcttcattcccaattcaagtgcttgataggtatcatgccgaaaatgtgaattattcttaacgaatacactgacccaggccgcagagcgtgttcgaaattttatattgtgtatttttgtaggccaacacttcataaagaaacacgcttctaatatatcatttgcgattggattggaagtgatcggagggtattctatggtccgtgtacttaaagggaagcaagaaccgcatcggcaccagacttctgtagagctgttagcatcatacatcgctaaaacgaaggttaaaattccataccttcacaacacccctttcggtctcgatctgggcatagccgatcttaccgtgatcgataacgatcgcatagcggcccgtacggcccgaggtctcatcggcccagccaatgctcttagaaaacttggcatcgggatcggtgaggaagagctattttacaaaatcaatacaagtcgcagaaatgtgtggggcggggttgtgctgctcactatgtcatctccgcggactccgttcgccttgccccaggcactcataacgaacggatcattgaaagcaacgaccgcgacaatgtcaacccccttctcacggagcttgggcaggttgtggatatagcctggcacgtggttgatagagcatgttggggtgaaggcaccttggttcacactcacgttaacaaagtccgacttcagctacagggtgagataaacatcaacttaccgggaactgagaacaggacaactttcttgttggcccactccttcgaggcattgtagtcgataggaatgccgcaggaggtaatttcaccactttcctcgctccatggaatgtacctggaggaatcagcatcattctttgcgggggtcaggatttacccacttgaagacaacgtcgctggggaatgagtcgccgggcttgagtgtagtcatattggaattattgtgaatattagagatgagagatatgtaagaaaaagttgaggttttggaaatggcggggtgaagatgtctcgacgtcacctgtgcaagctgattaatatgtatgaggtgatcgcccggcggagctcgccgacctcggcatccaccctcccttgtctgggctggtttagacatgaatgaacttggagttttagtgataaacattatgactcaaatgactgtacgattgatgatgagctatatagagaaaggtgacaggtcaagctcccaaatttcccaaataggcaccggatgagcccgcgtggggcttagtttagatatcgagaagcgttgaaattttgggtttgagaggaacgatgcaaagatgacgccgtgaaggggcgagcgatcctcagttttctttatacattaagtttcagacgagagccgctttcttcttctgataagtctatgtaaggggaaagtgttgtacaaatttccggaaatgaatccttaacacatgcatgccatgacagccaactattttttggtgttcttcacggggtgtaagaacatcggaggcaggcagagatcactatgatcatgctttccgtgtagtgtcagcaaatttcaacagaaaaatcaagggaccagcgaaaccactcacgtcgtctgcaccatcgtaacctagccaagctcgataaatctttccggcaaattgcgacccatacatgtatgatatcttcatcatgatatcattgtgctggttccagttccagatactattccgcccagcgctgattttaccaggcttgcctgaattagctcggagattgagctcaacaggacttgtttcgtgcgcatggtaaatgggttgaggaatttgaacggctttcaatccataataaagagcccaggaggtagggcccatttcagatgctagtcccagccctttctcagtcgtatccttatgcataaggcgaagtaatcgcgccgagacacgggacatcgcgacaacagatgcccgccgcggagtgcttcccctctgccggaaattatatatacggttagtaagaagccaatcagtatgctgagggtcgaattgtggcagccaggtgatcaagtcagcttcctcgcccacgccccagctccaagactcatcttccatatctgcgcgcggtggctctggtgcttcagcccaagcctcgatgccttttgctggccgtggtccccagatactatcaacgcctgtcatgctttgatctacctgatcggtaaaattttcccagttcccgtggatagcgggcatatagaagtaggagttgcgctcccatagattcttgcgacgctgttgttttgcaaactctgttgcctgctggagaaggtcgtagaaatgtcccgtataacgtgaatccatctcaaactgccagaaaaagtcgtattgtgggttcaatcgtgagaaaatctgcatgggctgaaagtattgaagcatggctctaaagatgggttaacgtctcgaaggtactatagagaggatataaatcttactcgtgaataccgatcattgggtaccagtcctctagtatctttgagttgaagaatactgccagatcccggagctctagcggaagagactttttaagactgtccaagtccgctggataaggcaattcagtgtctttcgcatcaaccaagaggatcacctcatattctgcgcctgataagagcgacagctccattataatcgaccggatataataaagatcatcattcgtgtattccatgtcgagccatgtgcgcagaaccacccctatccgtggtttgaagatagcagaggtatggtctcggtttgtctctctcttctctctctcatgacgtttcgctgttccttcctcttgctccctgtgcagagtcgatgtcttctcgcgaatatccgaaggttgataccggtctgcattgcgctgcaaacagtccttttgcaaagtggcccaattcacgtcctgccactgtactttgtgtgtttgatctccgtagccgtatgctccatatcgagaatatcggtcgacgcagaaactccaattgagattccacgcctcgtacgatccaaatataggcgctggaaattctagaaagctatcagtgcccaagtcaaatgcgccagaataggtttggctcaattcagacctgactgattccagtgaaatcctttcatcgctgtttccgcgtccctacgatccaggactgaaccatttgggccaacacattgctgataggttcccttccacgtgttgttccattcgccgctgttatattcaggatacgggtcgtaaggtatggacgatgattcgtgcgaagttttcaatacaagctgaccgagaccacccccatcataagcaggccctgagcctagaaaaaaggcattttttcgactgtaaaaagatgagcgtgttagcgaccgggtcaaagttcgctatcatgcgatttggacgtcaggacaggtgaaaggacataccttgaagcatggattgctaaaggttgttcccttgaccgaggtataagcatgaaaattgtaaatgcaatgacgagagcgattgcaacgagactgcgctttaaagaagtccggaataagtgccggcatttttgcacaatggcgtgcattttcaagacaggtggtggtttgtaggaagtggtttagtcaatattcgtcgtcatggtagtagtgattcattaataattagggatattagagatgcgataaccagttagagcgagaaaaggaaaaagaaaaggaaaataaaaacatgcagttcctacttcggaatccagcggaaagattatggcactaaaactgcatcttagacccgggggcaacatggggcaacatggggcaatatgggggttgcagtgggccagagatagattttcaagagcctcgaagctctaagtgaaccatgaccatcccaaaatgagttcaatcttttgagactaaaactgctcatccttttgctaattgtgcgcctcttcttgaattgaacgaagaattgtggaaacaaattactaaatacataaaacgaaataatacacgctagtatatattagtacccactagcacagcctatcctaatgataatatccatggataagatctcaatctctttatagtacggagtacacatatagtagccactccatgcttcgtacctagatgactacgatgtatatgtagaggagagatcataacgcgattatatgaaattgactagaatagctaattcagaggaaagggacgctgtctaggacaaactgggacacgtgactacgtgccctagcatgtacatacatacctagatagtaccaactgtcgcccaactccacctagatttagcgtggtatttaactcggtatcttaacatattcaaaccaagttaatatataagagcagctagcatcattaacagttatataattagtcggttatcatactaactaactaagaattagcagattcagagacttgtatatcagaagggaggaatttgagaaattccatataatgcagcctgcgggttcagtactgaaaagtgagtggatcccacatatcacatacggattttgccatgccacttcttggaaaccaacttaaagcgaggtaagcctcgtcaagccttgtcgtggccgctttgagccctccgcagtatttacaatatccaagaaacagtcgcacgataaaatcggattaaattatagatttctcccttattgtcgccttgaaaattacttgaattacgattggaacattatcgacatcaaatcgaaagatgataatatggaaactccagaatggcaaattgtggcattcattcttttagttttcaacactccagatgcaatgtgagcttatcactgggcacgggcacctatattcctgacttctagggtgcatatccggcttgtcagtcgaacagcccggctccggtcaattcaaaaataccccggtatcctagcaaagcatcacgcggggaagcacggattgtttcatactacattttctaccatattgaaatttatattctccattaggattaaattcatggaattggttggatattgactgtggaacccaaattccacagatgctgacccttgactcccgcaactagaacccagaatgtataaagctgcatctatcctgcatatctagatgtaaaagtactactttgcaatattaactgggattcagtcgactgatctagaggtcttggctacattggatatcatgttcgaagaatccattcaaggcaaaagacttcgccttcttgcccggctgagttgctctttggtgtgtccacccacatattgatcaagcccaatgagaacgacccctaattatattgagccaggcctttcttattgagggttaccaggctggaattctcggaggagtgcaagataccaaaccataccgtgatgcactcggagtaagctgcctccaaccagtattgtatgttctctgctgaccttcggaaagaaccctgaaggggcggagataatcccaatgatcgcatcttcttacacactcgcagctactgtaatgtccattgtggtggttgttgtggggatgcctctaggccgccgaaattcaatcctactcggcacggtgttgatattcttcggtggcatcattcaggcagcatcatactcggtagcacaaattatcgtagcccgggtcatatgtgtaagtctgtgccctttcatcgacgtgtcccgaattcgaaattaacatatggctacctaacagggttttggtatcgcggtaagacaagtgcagcttacgagactattccatttctgatgtctctcgcagtttattacatgcaatgtccctatgtatatggtacgagcgtccctcctcttgttgacaactacaactgatctgatgcaatgatctagtctgagatgagtatccatgccaatgagcgcggccccgaggtagcgatcaactgctcttcgctcctcgcaggtatcgctttatcttactgggcggactttggattcacaagaatgtcaaatcagctatcctgggtaaggttataaattctcgtcgctaaaactgggaactaatagttgaattgtcaaagcggttgcctgtttccatccaatccatatttgctctcttttcagcagccggcattttcttctgtccggactcaccaaggtggtattatgcaaaggggcgaactgctgaaggcgatatcaccctggcaagactatacaatgtctatcgtgttgacaatagtgctcagcccgagagtgcttccatggagcttgtcagagctgagattatgcagaacctccagcttgaggcggaacaagagaaccgactcagctggctaagccttgtttgggacaacaccccgctccgtgttggccgtcggataaggatatcttttatcatcctatccattcaacaaatgatgggaatcaatatcatggtttactatatgccgctaatattttcgaacgtcggcctctcgagctttttatcgtcgctcatttctgctgttgcattgacagtccaatttacaggctcactggtcactattcctacaattgagaggattggccggcgtcgaatcatgctggttgcagctgccgttcagagctgttgtatgcttgttttcgtggttttgaatggtcttcctagtaagacggaaaagacccaatgggcagccgctgctatgatgttcccatatatgttcatgtacggctggggatgggttacctgtccgtggtaagcattcaaagctgtcaaatttgcaatgcataaaggttgacacttattctaggctatatggacccgaggtatgattcttcgctgtgctcggcacgcctaatctgacttgaatatccccagatcgctcccctcaagtatcgccacatcggagccgcagttggcctgttcggggagtggctattcagttttgtgacagtaattgctggcggcatcgggctcgagacatccggctggaagatatggatttggccccttattttcaacgtgctgggttttgtcttcgtctatttcatgtgccctgatgtgagtgctctaccatcgaagcccaagagagcgatcttgctaactcaatatcaaatagccgaccgggagaactctggaagaaattgacgctctatttgacacggacttcagattaccacacacttccgacgagaagttatcagtgcatcaaattgagaatacggcttaagtcatcaaatgagatgcctttggaaagaaaggcgagcttgtacatgtgacgtcgcttttaatatgctatctaaaactcgatattcgaatatccgttgtaccagaaccaatatcctcgtgcgttgcggagatgtatatgtgggggattgtatcagggacccccccccttggttgttccaacccccctttggctaataggaccttcccagcccgagattttaggtatcagttatttctgccgtttcttgtattttctgccaggttgcaaagtgggaagcggcttgcttatatatggttgacctttacaaacgttgcaagcttcgaaccttcttgctgagcaatcgcaaatacctatataaacaggaataagcaagcaaataactatgttgtatacaaatcgtaggaaaggtggccaggaaagcggccaaaggtacggtgagcctttatagtaggcggtcagtttatgcctgaactatcgggcggattgcattagccaaggggggtccttgatacaattccctacatatatatggacctattattcccctaccttagtagagatcgaggaaatggatgtttagagttttttattcaaggtaccatttgtattggtatactatacaaaaggtaccttattttgcaatttttatcgttcagcgaaaattatcgttgactggggtaccagtgggcgcctaacacgattactgtttcgcaaacaaatggtattggacacggcattaatactagtgcaaaaggagtctctcaactccggtatatataattgatcatattcagcagggttcaaaatatatgttctttttcatagcttgtatttgtgttcatgtggctctagccgtcgtattacttgtgcgatagcactcttacgttcaccgcgactttgccaaaacgccggaatggactttgtagtttcgcataagaggcgaagagcgttgattcctctggaagcatgctcctccggaatcatttgtcctggttgattcagtgatgcattgaacacctcaagcgagattgggcctcggtacccggtgccaagcacagcagctgcgacaagctcaacaggcatatatgcacctctagactgctccataggatatagccgatgacttcgcgaccatggaagcagtgctggtgtatctgggtcagttggaggaaggaaagtcgttgggttcatcaactccgcatcgccacactggaagaaaaatatccgatcacccggtaccgtcgagaccaatgacgcgagtgatccggtaaggacttctagagattcctctaaggttgggtaaatccgcccgtggccagcaacattgtacggatcagcaaactcgacggcgaggatattgaaggcatccacgattagtccaacgttggggcggttggcaaatcgcaccacttcccatgaggccgaccatgtgtttcgagtcgcccaagataggccttcgtacccaatttttaacattcgcccaccgtcagcctttgcgtatgcggccgccatgtcgcccagttccgcgagatctcgtgccactgtcttgagatcagatgtcacacccttatccgcgcgaatattcgcacacatgaagacgagatcggtgtcaaaggcgcgcatgaacggaaaacgtctatgtagtaggttagtatagatcgccgctatgtcattatcgaggtaaggtatatctcacttggcgactagatcgaaggtagcctggcgttctgttggatctttgattccttcaattttccgaagaggctgggtgcaagcaatccgcattcccaaggacttgacaagacgagccaacttttgagcaatctgcagattctctgaagtgggttcccaaggctggtctcctggcagtccatgttcctccaggtatgcagcccaacactcatcaaacaagtcgatccattgatatcccgattcagccgcggctttcaagcgtggttccaagcgatgctctctccagttgccgagggacaaggtggcgatacccagtgggttggctttatatggaggccaggatactgtcatacttccaggtatggtagcttgtatgattttttttgggtaatgagtcgcgtcaattaatacaacaaagggatgcgaatatctcgaatatccaacctgagttgatgccacctccacaaaccggtgtattttttaatgcaccgagtggggtagtctatcattcttatgaaggtgtacagtattatgtattaatcaatcaaaggatttagaaggattcagataacaattgattgatattgttaaagttttattgaaagtgccccaagcttaagggactataaggtcaatgtacagacacctaaacgaatctcaagttcccgcacaaccaatttttcaactcaaggctcttcaataaaacgaccgttaaccgcatgatatccttaattctacaggaactagatgttgaaacggaataccctgggcgactggaagcttgacgcgtgtcattggagttttccacccagcctcttggcgatacctgcccgtcgtctccgagtcgtaggtccaaagagtgttgtcggggacaacgatagtccctttcgtgcccaaaatgctataaatatccactgggatctctgcctttggatacaaaggattgtcgccagtagcagactcccaaccgtatgggctagccacattgtcactcaccagaaatgtgccaacaactccgttggaaaattgggccataatcgctgccccctcttcaacgatatcatcggccgccacaatttcgtgtttccttctgggtatggtgtttatggcccatacacatgtcatcctggcacctgtgaggaaatgaagggcatcgatatcatgcacaaaattcgtccaaatcggccctcctccggcggaccgcgttgcccgccaactagcagaagtaaaatagccttcgtctttcttcgcagtccacaatcccgagatagctgtaatcttcccaatttttcctgtttcgatcaccgaccgtgtagttgacagcgagggatggaatctgcggtggtgtcccacaaggattttgcaacatttttcatttgaaagcgcaagtaactcggttccagatttcgaatctgtacaaaagggtttttcgatgagtaaggccttgggacgtgctcgatagatgacatctatcgctatggaaacatggagactcgaagggacgcatatcacgtaggcctctggtggcttttgtagcgccttcaaaagtgatgcaacagactcgaagtgcggaagagacaagctcgacgccaattcgcgtcccgggtggtacggatcaacaattgccaccagttcacatgttggtgaagacataagatgcttgacgtgcaaaggagctatggtacctcccccgataagagcgatgcgaaccttcgggctttctgccatactgaagacacaagacaactgtttttggattcacgtagaaggcctatgaacctaaacaatgtggggattaaacattcattagatagaagatatatttcacagtttgatcccggtcaatatatcaaaatgccgacaaatatgaatgcggggtcatcgaaattcccgtaagttgtcttcctagattcgttggtattattttcaatgatttctctcgttagtccctccaaccctacttctggtccatacaaacaccaaatatggatatcctcaagcaatcttatgctcacggcagctccccgttaccatcgaacgcagcagtgactcagtatcatgtctatctttttggtagtaatatctccaaatcactatcgcccttgatacactctatcctatttcgcgccaactcagcctcatgggaatttcacctcagccagaccactgacgggaacatattctggaagcaattacgtgacaacacatgcattgggaccacaatcacgatgccgaacaaggtgtcctttggcctcctactcgacgacttgaccgacgaggcacgcgttattggggccgtcaacacctcattcgttcggcttgatgatcgtggacagagaagatatatcggcacaaacacagactgcatcggtattcgcgattctattctctaccgaatgccccaagcggctgccatggccaaaggccgcccgtcgatggtgattggtggtggaggcgctgcgaggagcgcaatttttgccctctggaaatggtttgggtccacaaagatctatgttgccaaccgtctcaaagccgaagtagatgctttgatcaccttctttcaatcgacggcaccggatatgacactccaacatctcgctactgttgaggaagctgcaacctgcgaggctccttatattgtcatcgggacaattccaaacgatacaccaaaagaacctggtgaaattatttgccgtcaaatcttcgacaccattttgcgcaggaagaacaaaggcatcgtagtagatatgtgctatctcccattgccagtgacttatttgtatacaaatggacagcaaaatggctgggcagtcatcccagggaccgaggttctagtgcgtgtttgcatagcacaacatattctctggttggagaaggatgtcaataaacaaggagtggaagatgcgatttcagctatctggaaagttgtaaatcaggggcaaagtggtccaaaggcttcgaagatttgaattggatttttagcgttgagactttcattgaatactcacctactcattcttcattctattattttctcctcccttggcgtaaaacaagtatgcatctcatgaagtgtgcgcaagtggagatggctgcgggtgtcatcgattccttcgagatagtatagccctttaactaactaggaaggagttgatgcctagatgccttatcttataatggcagaaaaattctattggcactcccacatagctcaccgccactataaacatataccgcctacctaaaacgcgcagtatactagtatagatttcatagtatgaattcatggagtttttgaccggcaatatgttagaattaatcatggggtggctaagggtgcaaaaccttatgtccagtcgctgtacggagtacatatgccttaataatcgaagtactcccgaggtctggttcggagagagagcttgccagccacctccaaaaattgagatgcatgaatttgtatggtgccgaaagcttcatttattacatggatcatttatatttgtatagagcagtgtaaagagcggtgctaatgaaggcattcagggaccaaaatgcttcttaaaaaggggtttgaacgctggggtatcaaaggaacaaaacaaaatatacatgtcacttgaagattttgactcgtagtagcaatatttacctctggtttcgggcctaattccgatcattagtgcgactgtttccccgcagttgtgattgaccgggtgacaaataaatagcccggttaactaggtgaggatatcactagatgctacaagatatagagcggaataaaggcgcattatgtcccagcgagagaacttaaatttctcttaaacattttttaactttgttgctgggtctgtatcaccatgtctgcatcgcacatctcccctctcgctcaggtatgcttctctggttaaaccaaaccctcgatgagactttctaacaacaaacaactagcccattacgttgaaactctctgggaaagtaatccgcaatcgtttatatcgcacacctctcagcgaatatgcttcaacgtatgacgaaaacaacgtggagaactgcggcaagcccatggaccgatatgcagagctatatcaaagtatgatcgggactatcataccaataggactagtgctaacgagtacacagagctagccgatggaggcgcggggcttatttgcactggaaacatccccattcatcgcgacaatctcgaaaattacaacaatgcggtgttggatcccaacaatccctgggatccggtcgcagcttttactcccgcggccaaagcagccaaatctcggggtgcaatattcctccctcagttacaatttccaggacgtcaggttccggaattcctgaacaaaaatcccaagtcatcatctgatcagcagcttgaaccttgtctcaacaaaacgtatggcaagccctcgccgttgacgaaggctgaaatcaaggatctcatttcgcgatacgtgtgggcttctgaggtccttgcagaggctggtgcagatggtatcattgtgagtgtttgaatctattcctgacttgttatgaaaagctaaatgaggcgtattggtagctgcatgccagccacggatatatcatgaatcagttcctgtcgcccaaaatcaacaagcgaacagacgaggtatgaatgttaaattcctctcccccttgcaatcaattaatgctaatattgactaaactttacagtatggcggaagccttgaaaatcgggcacgctttattttggagatcgtcaatgcgatcaaggctaaacttccatcggacaagtttgtgatagcagcgaagttgaactgccaagattgttagtatttccatcccatattttgaagaaaagcctaatgggaagatatatgtagtcatcgagggaggccaaagctttgctgaacaatgcgttgtgataaaatggctagaagatgccggtgtggacttttttgatatctcggggggaacatatgcctctcctgcatggcgtggcaacatcatgactgaacttgcagagcgtccatcccaaaaacagcgtggaaggtaaatgatttcaattgcttcactgtttttatatgctgactatgcgaagttacttcattgagtgggcgcaggagttgaagaaagtgctggtgagtatattacatgttttctgcgacttgtgatcaaataagctgattgacaaatcactagtctcgggctgtgattggaactaccggtggctggcgtgatagccatcgtatggcggaggctgtggaacgtggagacatcgacatgtgtggtctgggtcgacctctccgagaagatcccgcctttgtgaataaggtgcttcaaggggaaattcgcagaagtaacttgtaggttgatactcagtgatctgaaacagtcactgtaacccacataatatattcaatgggatgttaggaatcccgcaaagaatcatattttcttctctttttttcacttataagatcactaagaatgtacctttgacccttcatgcagacttttcccatttagttcatagaagccattgtaaaatcaatgctaacctgactgagaaatacatggtttatgaaagcagtagattattgccagtcattggacactaaaaatgcataaacaatagctatgcttttcagatttctatttgccaaaattgttaaaagacggccccaaatccaggcccgaacatttcccggaagaagtcagcaaacccctcatcatttagatccccctgggtagaaattgacgctgtagtcaggaaaggatcgtaatccgagacgaaagcctcgtatggcttcgaatggggggacttctgtggcataaattgactcgcttcgttatcaaagtctgtactggtgtacgacgcatccgttctggtctggcgaagttgactttgggctttcagtcccgccgctctggctctcagtatcatcatgaggtgttgtccaagtaacgctgcgattccaaatcgatgcggtggagttgttcctgcacgttctaattgaatggcaagttggctgagtaaagcaagaagttccacgtcatttccggcgcgggatccatacacggtgggaaatagcttcaaagccaacacgccggcgtatgatatcatagcccaagttggggccaacatgcaatataatggctccccaatatgatgcaaatcgcgcacggcgacctcgcaagaattgactgcagcctcaaagcaatccagtcggattgcatccatattttggtcccagtttatggaaccgtgaagggcaaacgacaaggtccaaagcctcccgtggagataaacataatggaggaagatatgggataacttttcagacggcgatgtgattatatcgggcattggatgtgacagccaaaggtcacaccacggcctcagagttgtatcaaccatttctcgtacccaatggggatcaacgtgtgtcaaatgagcttgattttttagttcattttgtagtgatgctagaatgcgtcgcaaggtgataaatgcacatgtgtgcttgtctgtagggtccgccagatgatgaagccaccagctatcaacactttgtgtcaagtccgtttccgggaatgtgtgaattctaccgcaggctgcactgttcgcccgttcccatagtagaatccttagccaagttctctcgcgatttcgtgccatgcgttgattatcggtgtgatcctttggggggtactccagtaataaccgggacgagtcctctcttgggagtggtgctggggctgcatcttgggttcggtaataggaagcactgagcgtgttcagaggtgtcgcatctttggcactagaatcctgatctaggcctagttcggctgctacaccaaaggcatacattgtgtagagccatgagcgttcctgtgacagtgtctctgcgggagtggccgataacaatgagatatagtagccttgaacgatttcaaccgacttatatccacaagtatgaacgtgtttcgagagtttttcgccatgaaggcgtaatcgctttgcgactgatgctgactcatgatcgaattgggcagttaaagccagtatccaggtgaacaaaagagccgatcgtgaacgcacgaaatctggtgtatgaagcatcggatctaggattccgttgactggatgcaagcggctgaaatatctagaattaatcagtggatttatattgacagtgcagttaatatttggacttacattggaaatagataatagacctcagccatggtcaccaaaccaaggtccactgggtcaacatcggggccaacatcgcgtagaggcacttgaggagatgacttgaaatagttcgagtaacggtatgggtgctcagaaggaccgagcagagcatctattcctgcttcaagggtgtctctgtccagttgtaggccaagtgacacgtagcctggccgatgaagcagttgccgacccaggcttgctccaatggactggctagccgatgactgtgaagtagaaggtgtttcgtttgtttcacaggaagtgttggcagacattgactgtagctccaaagcttgggcggcgtcggaggcatctgccagcaaggccaaaggattactgattggttcccggttggcttgagagagttcgccgctgcggaatacaggagagacaagttccgctagccgctgattctcttgtatagctggcagagtcgagttaaaacatgacgcacaagagagttcacttcctagctctggtgatgttttggtggggttggttgtctcggctgagtggttagagaataagagctctagaatcggctcttcgcttgcgacgaaatcatccatctcatgattctcgcccgtataacaggtttttgccttctttaattccgactgcattttccgataggctttttcaaaaccttgatagcgacctgtcgcaccgcgcttcctcccaagttttctcggctctgggatattgcactcgcggttggtacgcttacatcgttggcaaggttctgtcaagttgtcgccctgttgctccctttgtgggcggatgcatctcatctgaaaaatattttgtgagtaagtatgtatatgacttggggtcaaggattgtagggtataccttcattttccgacatgcctcacacgcggccgcgctggcgcgagtttggccagaggtattatcatccccagaatatgatgacattgaggctctaagcatcaaataaataataggatcgaggtagtcaatggaaaatgtttgtttgatttagggagaagagagagtgtggagaaataacaaagaaccccggaatttcaaaaactgcggggaaattttcggctatgagataagttataactctacacgcctcgacctccgtccacctccaatgtcgttccagttacaaaactgctctgctccgatcccaggtaccatgctgcattggctatatccactggctggcataatcgcttcattggcaacgagtcttctacttggcgtagccgctggcgggaatctgcgccatttcgaatgctagattgaagccttgttcatgttaatattgacctgggggttgatttgggtcaacatacatcgacgtgtttcccacagcaggggaaatacagttgaatcgaacagctggagcatactcaagagccattgtcttggttgctacctaaaaacgcgtcactatctggcgcatccaagagcttcccgtttttcacttacttctacggctgctttggaagcgttgtaaatggcaaatcctggccgagggcgtgtacaacccgtgctgcaccagtcaataacttcataccagaatcggattggctgacccacctcgttatgttgataaatattccatgtccctgctgcatcataacaggcgcaaagacctgtgcacttataaaaaccggctgtataggtattgtcaagctgttatccacccacagcagctagggcatcctactttcacgttgacattgaaagtcttctcatattcgaggagactcttcgtgtggatgggctaaaccatcgcattagaagggtgatcgcattcatggagggaaacatacagatgggtcatgggtaattcctagttgggctgagtcaacaaatcagatcgtaatgttggctctttggaatgttctcaccagcattgttgaccaccacatcaactctaccatgggttgtctgtgccaaagctagggcgttctgccatgtctctgggcgagtcacatcgccaaggagaaattcgatattctggtcggctcgctgcttactttcacctttcacttgatccaaatctaatattatgaccttgcatccctctcgactaaagcgatccacgatagcagcaccaaatccatcagcgccacctaagaaaaagtcccagttagtccagagctgaccggatgggatggatagatgaacctgtaacaatcaccacacgtggagtgttcattttcgcacgaagaggcatagttcactcgatttattttcgtaatatgggcgttttcttccgctcaattttcttcttatgttttaactgcttaaatcggtatctcatctcactatccccgcacttcgctcactccaccggcttcaaatttggtcaccggaattccctcatctcagatatctttgcattctcgcatcaggacaactcttctatccctgttcggccttccctggttattctgaatttccagacaacatgacatccatcaaagttgcgattgctagtaattcgctgggcaagtcgacttcggggcatacacttcttcataaacttgagacggctaaattgcacggatttgatggagtggaggttgcgatcgagtgtcttgaagcgcatgcttcctctttctcccagtcttctcgagcttctcgcctgcgtgcagctgccactcatgttgaccaaaaagcgcaagatttatctttatctttgattgcgctcaacccatttggcgcatacgatgggcttgttaaccctgtcgaagttgagtctcgcctagaggaggctgagctctggtttgatctttgtcgattgatgcgaattccaatctttcaggtgcgcactattgacattttgatggctccgtgtcagactgaccttgcttttttactgtagatcacatcgtgcctctaccctatcgatcctgttagaattacgccggaggtaaccacaatcgccgcgaacatgaagcgattgggtctccttgcccaaaaatacggtttgctagttggatacgaagcccccgcctggggaactcacctcaacacttggcaacaaatccatgaaatcatcaagctcgttgatcttcccaacgtttgtcattgtcttgataccttccatatttctgccaaagaggcaggtgatccatttagtgctgtggctcctattcggccaggcggcctggcaaatttacgccgatccttggaggaaatgaaacgaactgtgacgccaaatcagattgcttattttcagttaagcgatgcaatggttgctgaccagggccaggtgggctaccaacggcgtgatctcaatcaacccccctatatgacacaatcgcgaaactgccggatctttccctgcgaagcgaaccgtggaggtgtgcttcctgtacttgaggttgcacaagcggtgtttgatcttggctacacgggatgggtgtcgatggaagtatttcatactgatatgtggaatacgcgctcctcgtaagtgagatattcaatgagaatgaccttttctcttaactttaacttgtgtatagagtacccgacgactgggctcaaagaggaatggcttcatggcgagaaatatctttccactgcgggcttgatcggcataccaacgggaggttgtgaaaatattgaatgctatgtaagataacaatgttggaatcatcagcacttgaaacttaagtactacacacaatactctcatgtgacaaaaagcatattcaaactattaatatctatagaggattaataacaataactgtcgaccttccccttggtaactaactaactaccgcttttgcccccacgcctccttctatctaccgcgcccataccgccttataattatatacaccgctttcgtggcaaatagtaataagacagtagatacctgcaatttgtatgtaagcctctaacaaactcaagtcacttttgttatatcaactgcgccatcaaaaatgcttcattaatacctggggctacgtcctacaggaatcaggtagagtacacgactttttctaatcaacatgcatgttttattactatgtaaaccagaagatggcagaatacatggcagaaaaaataaagcgtggcagaaataggcagaattctgagcgatatccgatcaggaaggcggggtcgatagttataccaatccctatatattgaatgtcaatataagaaattgtatgtatttgacgtttccaacttctaagctctgctctttttaatttcttgtctagattccgctaccatccctcatcattgtctagctttgctcacatggaattatattcagccgtcaactgtgaatgagatatctgtgcggagtatggccccgcagtggtgtccacccggtcacttaatttattcgccggcgccgaggcatctataagtgagtatcaaactcgaaaatataaccattatgttaaatattagtcacttgctctgatgaagttttcaagaaatagttcttcttccgtttctagcccgacatcaaccatatccacaatggagagaattcaagtcgatgtcctcgtctgcggggctggcatgtctggaatggcatgcgctgcttttgcggcggaagcaggagccaaagtactggtcgtcgaaaagcaaggggatgttggtggttcgtcaaattattctgcaggaatgttgtacgtgattgaatcaatcttcaagccaaactaggttgttaatacatactgtcaacggacagctgggctccacagacatacaaaaaactgagagactgggtcccagaaggagatccagaattacaaaaggcctggttaagcgattatctaccggctgtacagtggatgcgtgaaaatggggtgccaacagcagaccggttcgacggcatcatgacaatcggtaaggctaaaagaaaaagaatttaatgaacagtgaccctgacacatcataggaattggattcccaattaaaatcccacaccttcataacctccatcgaaagcgcattcagtctagcaagacacgttccgatattttcaccaacacgtcggtggtcaagttgattcagaaacagcccggggtttcagggtcgagcatacttggcgctgtcatttgcaggaactcccccaattctccagctaaatattatgaagtccgagccaaaacggtggttttggctacgggaggtttccaaggttctccggggatgacatcccaatacttgggacaaggtggagacaacatttttgtgcgctccaatcgtggatcggtgggcgatggacttaagctggccatcgaatctggtgctgggactagtagaggaatgaatacctactatggtcatcttctggcagctcctcttcgagccgaagacgtgaatccaaaggactatcttccactcgcccaataccgtaagagcaagtccttgtcaactcagcatttctctctaatcagtctacagaaagcaaatactgcctactgttgaacgaggcaggtcggcgatttgccgatgagaccacgggtgacgagatcatcaatcagtatctcgccaagcagcaaaagcgccgcgggtttatattattcaagtatgtcccagacagaaaaaattggggcgaaattctaacctatggcttactattctagcgagaaaacccgtctccaacactgcgtcactgcgttgttccctaatgcaggggacatcgatcgtctgcagaaagcccgcgaacatggctgtaatgttggaagtgcgtcgacattgagtggtctgatagatgttcttcacgcctggggtgtgaacaatgtacaggcaagacggactatcgaggattatgaccaagtcgtgcgtttagggaacaagagcatttcccttgacgcacctattggtcgtgcttgttctccccctgcaccattggtagatggggaaggtcccttctatgccatggaggtccagccgtcgtaggttatatcttacacagtccagttccacctatctaatttcccataggatcacattcacctacggcggtatcgcgatcgatgcgaaagggcacgccttgacccccgataaatccagaattccaggcttgcttgtcgcgggtgtcgatgctggcggcttcagtaatctcggatacgccgggggtcttgcactcgcgttcgtcacaggactatgggcggcccgagaggtcgcacgcgacttggggttgcctgagcctcgcctaccccctcccgaccttcgagacggggaggataaaccaatccaagggcgtctttgagctagttccattgcaggttgcatctagaagttgacctcgttgtgattgcttttgatcaaaatagtattgtgcaaatctacaacatacactaaatattgtgacgtcgggtggctcaatccatttctatcaaggtcctcgcctttcagccgatgaatataagcaacgaccctcccattctctgcttccgatcctcttatggtaaaaaactcagttcaccattgatgtctggggcgatcaataagtgattgaaccctctcagtaggtacggctctgttgcttctctctcccctccccgtccccttgttttctaccctatcggaaagcttacttctctcactgaactctgacgtgtttccaagacttttactacttcatcacacatatggtaactatacacgaacgcgaccgggcaaccacttcatattcatggtatattcaatcatttgcatatattctaaccgcggctttagatacagacttcgcctcccaaattcttcactcggatcagaaacacccattgggcttttctttttccacatcgggatattctatggtgccaccaaaacgccgcgataacgcatttttccttcttccaatgtcttcaggctttgtttgataccatccaacgtcaaggggaaggtcatcttgacaggtttgatgttgtggaatgaggcaaattcaagcatatccctgtggacctgtcttgaagccacgatacctccttggatccgaaggccattcacgagcagcggcatatatgggattttgagatcgtttgagtcgacggacagaggagaaatgacaccactgggagccatgatactcaagtacattgaccaatctggctgactgctagtcgtcacaatgaggttgtcgataggagctttgaccttcaactccttcacacccttagtcgcatagaattcgccggctcccagcttgatcgcctcttccttcttgctgtctgtgccggagaagaccacgacttgacagcccatctttgcagcgaattgaatagccagatgtcccaggccgcctactccaacgataccaacgcgagcggttggacgaacctgcgcgacatggagggcgttgaaaacagtcgatcccccacacatcaatggtcccgcatcttcgttgctcatgttgtcgggaaccttgaacaaaaaggcttcacgccacaccgcgtgggtaccgaaagacccttgatcgagatcggctagaccgtacatttttcgcttgctgcacaatgtctcccacccggtgaggcattgcttgcaagaaccacagcagtcatgctcataaccccaacccacgcggtcgcctttcgtcaaagtcttcgcgtctgggccagttgcttccaccacacccgttccctcatggccaagggccatgtcggctgactggtagtgagcatcggtgccgcacacccccgaatgcgtggttcgtactaagacttcgtctcgtttgaggtcctccagctcagtctccgcctgtttgattccatccttggagcccctgtatacggtgaatttgattgtcattgtgggaaatattgatgcaagatatttgagtttgcgaaattggaatttattgatgaaggaatcagatgtttacacttatcagcccacgagcctgctttataggccagcccgtttaagtacgtcagtacccatatttcataccggaaagtgaacaaagcttgtgtcatcacatattcagtcaagagaagcaaaacaagttgatacgattgagtgggcctcctgagtcctggtcgatgagatgggtagtgataggcactgatagcaaggcccttttcccctagacttccttgatttgagctgaaagctcgatgcaaagagttcataggtcaaagctataaaactctcggcctcgtttatgtatcccgtagcctttcctggcttggtcaactttacagacttcgaaggactgaaacttgatgacatcatacaggttcagcgtcaccaacatagcatatggtcacgtggcagagcaaacatccatggatgcgattacttcatgcccctccggatgcggaagatcttgtaaaatgttcctagatcctagctcgctcttcaacaaacaatactaaacctcgaaggaaaccattctggcggatttaagggaggacatatagtattcgaaaagctcttgaaatccatagattcgagagctttgatatccatatcatggaatatcctcattgagatcccattttgaaggcatcggcatcttcaactcagttatcgatgatggtactccgtgctaccgtctgggcaagtgattgacgctcttctccgatcgtcgctaattctgccataatgcaaaggcggtaatataaggccacacgcgatatcgggcatcccgatttggaaggtacgaagtctaaataacaaattttcgctcgcctcacactttaattgttgcatatagtcatattcaaaagacatatagattcttccctctgcaaagttcagggaagccatcttggtgggacaacatgattcaggtccatggcataactagcgccggtgaatcaccccacgtctcgtccgaaaaagatgcagctttggcggtagtgagcgagttcgcccaagaaattgatccggtcgtggaaaaaagggttctgcgaaagattgatttgtatttgatgcctgccatgcttataggttagttatacgcttcatatccgtgacatgggaattgttgactaactcgaacacaggctacggcatggtgtactatgacaaggtgcgatgactgcgccgatggctttgttagccaatatatacttatttctcataggctatcttaggtagtgccacgctctttggcatgacgaccgacttgggattgctagtgaaagactattccacttctcctccctctgctgatacttcacggctcagctgggcaacgtcgatcttttattttggaatgcttgctggcctatacccgatgacatttatcttgcaaagatttaatactcgaattgttcttggtccagttgtcctgacatgggccattgtctgtgccgccaccgccggtgtgacaacctggcaagggctttttgttcaacgattcttcctcggtatgtgaccttcaatttcttttactaatctcttatctaataaacgataggctttatcgaaagtgttattcccacgggcttcatgaccatagtcagcgggtggtacacccaagaggagcaggctcttcgacaggcatggtggttctctggcaccggttggttcactatcatcggtggcgccatgaactatgggtttggccaaatcacggctggatcattgaaaagatggcagtacatctatattctggctggtgccttgacctttttgtttggcctctggtgttgcaccatgcctaattctccggtttctgcctggttcttaaccctagaagaacgaagggttgctgttgagagactacgcaaggggcaaacgggtgttcggtgccagaagatcaaattcgatcagatcaaagagtctatgatggacattaagatctatctagtggctatcatgatggcagcagcgtgagtttcgtctctcgttataccaccctaataacaattaggcagcatacattccttgctgttaacctctctaaatataggtacactatcaatggcgctatctcgggctttgggccgttgattgtatccaccttcggctatgatacgcttcattcgattttattccagtttcccgtcggcggcatttgtgtcattttcattcctctttgtggttatatccctactgttgtccctaatacccgcatacccttgctcatcgtgtgctgcctacctgttattgctggctgtgtgatgatttggaaatcccaatggggatatcatccagttactccagttgttggttatgcgctaactggcttctttgggccagtggtcagcctggtcatcacaattggagctagcaacgtcgccggagcgacgaagaaaaccgtcatggcagcaaccgtgtttgtggcttacactgtcggcaacatcatcgggccgcagcttgtgaaaagcaagactaagtcacagcattatccagaactctggactgggatgatcatctggtaagtccgtaactgattcttcttgttggactactctaactaagtatagctactgtatcacaattgctgccgcagtcgtgttgtactttgtccttcggcgggaaaaccaaattcgggaatcattggaattggatgaggtgcaacgagacaagattgcatttgacgatctcaccgacaagcagaatccctttttccgatatgctttataatgacccttccatctacgagatggagactcatcgaaatcgaagctagaatttctggctgctctctaacactacatatctgacactcatatcacgtgcacatgtcctgtagaagataccaaaaaagtccaaataacatattcaaatatactcaaataccttcagttgaattggaactgtcctgaacgtacatagttcatcaagggtccctggcttgctccatatcctttatattcaataataaacgtacgatgtgccgatatgcgactccttgcgaaagcagatagtaacataacaacctacaaactggaggattagagaaggattccaaatattatgccacatgttttcgatcatcattgggctcgattttactactatagagttacaggaatgttgcaatattctaacgcaggttcggtccaacactcatgtctccagcatatttaatccaactcgggctgtttcatgatcatacgtgataccaaattccgggaattaaattcgatctaagataggctaggtgtattcgggaaccaaagagaaaaagaaagcacaagtacccttgaagcactttatgacttgcagaaagtggtagccatcgcatcacttgcaccactacctggctcccaaggcctcctattcgttcgctatgttagttagtcagttagtttccttcattctaactggtcaacttccatgattatttcttcctttcacttcgccctgagcacatatcctccttgcatagttcggtcggaatcaaatccccacccttgatgcaagacttgacaaggagctttgcatctcctcagctgaaataaaattgtgtgtaacaaggttcacggattcgaatctgttcgaattacagtccctcttacaatttgatctagaaacaggctccgtattagtctgtcggattgcgaattcctctggcggaactgaatgtagtttggatacataaaaaaagcaaaaaagaacaaaaagcccagccgatattgggtataaaaatatgtacaacggaaaataaaataaatgatataagacatcccaacgctcgaatacccacagtaccaacaaaatgagagaaataagaagtgtccagaagatttcatcttcatgctatagctgggacttctcactcctatgaacaattgtttcatgaacaacctttattccaccctggctactctggctctgtgacttccagtcgccgtcgcctgcggtgcatgtaggcggttgctgtcgtgaggtaggcaagatcatttgctcgtcgctgattgtattccattgagtgtctccgggaatcgatagcggatggcggaacttcttgcgtttggaatacccgccgccagtgtcggcatctgatagatggtagccagggtaactctctgactcattccttgatgtgatgtacagaccagcacgttttgtaaatcgtcttatcaatgggtatatcataggaatatttccgatgatgacggcgacgaaagtctcgcggcaggcccagctgccagcttgttgagccccatttgcgccagcctggtgaactgttagattgtgttatcccagcaagtaactctcaatacaacttactgttaagatgagaacacaacgcagaataccagccatcatgacaaagaggccaccactaaaaagaaccaagagctcgagtttttcccgccattttagtcgggctttaacaagcatcttgatgcatgtgttgttagcaacattagacaccgatgtttagagcgaggcttaccggtgctggaatactaattaaatagaggtcggtcgcgacattgagtaccacggtcacatagatgtcgatcttggacacggcgggctggcagtaatctaacgaatagtcagagacacggtctctcaggatgagaagatatgacacacttccagggtttggatatatttgccaattcttgtccattggatgacatccgaagagaattgaacaaaccgttgcaatataagttatggcaatgagaacgtaggcgatatggattcggattcgcatattcactaatcctgcgctaaagggtaggatatacgtcagtgacaaaggaccgaatagatgcaatcgaatcaaaacccacgtcaatcgagagtagaaaatggccatgcatgttttcagcaaccataataacagagtgtatagtgaccagccggccacctggaccttagagccgcccacacgcaggcgatattcttccgaattatgcgacaactctcttcgctcttcgtctgtcatcgcattattggcaaggcccatgaaccacgcgccgaccatgtacgcagcaccggtttctagcccatacaccacctgtaccccatattgattagcaagctgaaagcaaagagaacccaggttccaattcaactcacacatgccaccagcattagataatcatcagcttggaacccttttgggccaaccataatccatcttgcagttgttcgtaggccaattacggtaatggctacccccaacaaggtgaacgcttcggtattgaacccatccatagttgacgacttgcggtgatttcttcgggcgatatgccatcaaatttaaagaaaaggaccattcaacccagggtgtacattcagataaaggaagagaaagtcaattgtaccgagggggaaacgagcggcagaagaaagtatcccaatgatctcctctggcctcgctcgttgttattggaaccagaccggataaagaagcaagcccactcgttagtccacttatcaacaccaacgaatagaagaaaaagcaatgacagtatcgatctcaaatatccgttggcctgcttacttattgtggcgcccattaaactgaactgcaaacgcagtctaatatggaaatactctcacatgtgaacggaatttatgataggtccagttttgtcatgcaagagtggcagcatgcacaagtctcattggacagcgatggaatatcatttggtgctgggcccgggctatgggtcctaactgccgggggaaagttttaaggttgaaagcaccgtttgttccacttctagattactggtttttggaaatgtagatcggcagtcaaaaggtccacacatcccctgagtcgatataactttccctaagtgggaatgatcgtagcaaagggcgatttttcgatccaatatggagtaccctgatagacttcctttgtctgacctgagagttttttttttttttcggttacacacgaatactactccgtacggtcccgcatgatatcaactgggccaatgttgagaagcagcaataaaccgcaatgcgaacggggatttgtttgggttttcctgcgatctatgacatgcaaacagaccagctcagagacatacggagtagcgcagcataaagcttgcgtagtttagccaatcatatgtatgccattaggggaagatgccatacaattttatacccagggcaaatacggagtatatatgtatcgatttctctaatccacattctcttttgggttggtttgattgctgatcgagccggagattgctccgaggatatgtaggtgccaggagacttaggactagcgggctctcagaccagtcatatatatccgatcgatgccgttctttctataccgcgtcaaatgagtccaggagatatcataagtactgaatcaggccacggtttccggcacggattatggcttgacagcttccatttatccacggagtaataaccttaaccttgtgcataatctcaaacgacatgctactgtatgtttcaaattgaaatgtatgacatgttgacgatagcggtcttttccgacttccagcgacttggtgggtcccaaaacgggccgttcgatgttcatccgattctcaagcgacaactatgagccttgtactctgtactccgtactccgtacactgctgtattgttgtcaaataatttgcatgagatcaatcaattgaattggactacgaccagtagtcggattgagataccaaccgaaaacggcaacctgcatattgttgatcccggcttccacaaaattggtaatccaaacgccagccacggggtttccaccgtcgaaactatttaaaatcacagtggagtttggcttcacctcgctacgcacggagtactccgtactccgtagttttcttatgaaggctaggatactacctaagattagaagaaccgacgatccccgtgggcctggccatgctttgacagacgctttgacagcagggctaaaatagtcaaacgacggagaatctaaaagattcagtgctgattcgaattctcccgaagagcccctgacactgaaggggtatcggtacatctcggtacggagtacaaagtagtcaagtgcatgccaagcactccgtagtaggtagtctgttacccagatggggcaaggggtctgggactaggttcacgggtagccattatagaatcatcagcttagaatctctggtcctttaaatgtctcaggcccttttgaaccacgagctctgtctcaggaggtacaagccatgctaaagttggcgggaactgacaacgtcgtggggtttttaaggtgagttaatttaatagtcccaccattccatcctcccgggtgtcctgaacagcaagggctaaaaattcaaaacccaaaaaaagtactactcgacgctaatacttttagttatcgctcattccttcgtttccagtaatttggccgctcgtcttgtttgcttgtacataaagcatcaatcctggtcgcgcaatcggtttattttctgcctcttaaaacgaaaacaagggagtcttcaacaatggagaccgtggatcttgttgtggtaggcgcaggtaagttgaatcttcactgtcgcatactatttcgctgacaagcattggccaataggttggagtgggctctccgccgtcaagacctaccgcgaggtcaatcccggccacaatgtgctcttgttggaaactgccagctctattggcggggtgtgggccaaacaccgtttgtacaaaggcctcaagtcgaacaatatgcttggcacgtatgagtatagcgacttcccaatggacgaagcgacttttggcatcaagcctggacagcatattccgggccatgtaattcaaaaatacatggaagcatatgtacaacattttaactttgccgattgtattcgactggaacaccacgtggaaagcgcgcgacacaagttggacggaacgtggcagttaagcgtgtcgcacggagcagatacaacaataatcgataccaagaagatgatcgtggccaccggcatcacgtcacaggcatacatgcctacgttcgaaggccaggagtctttcggtgcgccgcttttccactgtcgcgatctgctgcagtatcaagatgcagttctgaaatctggagagcgcgcaaccgtttttggcggaaccaagtcggcctgggatgcggcctacgcttgcgcaacggcaggtatgaaagtagactggatcattcgcgaatccggtcatggacctatctggatggcgcctccctacgtgacgcccctgaaaaaatggctggaaaagcttgtcacaacacgcctgctgacctggttcagtccctgtatttggggagaggctgacgggtatgatgggattcgcagctttttgcatggtacctggctgggtcgtaagattgtggacgcgttctgggctattctggccgatgatgtcgtgcagttgaacgagtacgacaagcacccggagacgaagaagctgaagccttgggtgagcccattctggattgcttcctcgctcagcattctgaactaccctaccaatttctttgatttggtcaaggatggcactatcaaggtgcacatcgctgatctcgagcgtctctcggatcacactgttcacctgtcatcgggcgatgcgctgtcatcttcggcgctgatatgctcgacaggctggcgttgcactccaaacctcaagtttctaccggaaggcattgaccgcgagttgggattcccttggagtgtggatccgctgaacgaaaagctgttgaaagcggcggatgaagagattttgcgccggttcccccgacttcgcgatcaaccaaagccgaacccgaactacacgccgttagacgcgcagtccgaagcggctgtgccgcaccccttccggatggcgaagttcatggtcccactttcgctggtaaaggaacgctctctggcgttcatgggtatcacgatgactatcaacacaactctgattgctcagactcaggcactgtggatctcagcctatttcaaaggcgatctgaccccagctacacacgaacgctgcccactcgctgtgcgtgctacgtctgacctcaagacggaagacacttcagaaatcgaccttgcctgggagacagctctgtttactgaatttggcaaatatcgctacccgggaggattcgggcgacggaaccctgacttcgtgtttgatgcgatcccatatattgatctgatgctgggagaactgggtctgtcaccacaacgcaagcacggcttgttggcccggtgcctccagccatatggtcctgaagattaccggggtctggtcgaagagtggaaagctaagcaaagaatccagtaatgttgcgggtgtcgtgattcatttatttcattcatttcatgttgtctgatgtgtactagtttgttccccttttccccttcgcgtgtcgcaagtgtctccaagacactcccggttctttcttttacataagattcaagacaatagaatgatgttttctatactatgtgtgagtatgttatatgaacatgttataatattctttgataatgctcattttcggcatcatccaccatgacaaattgctccaaaaccgcaacaccaacgagacatgaagatgaagatgatcgtacatcacgttccttcgggtcaccacctccggcccccattggacgctggctttcagactcaattacctccccaaccatgtctcccgtccatctcatataatctttcccattccccgcgaccaccattcttactgagacattaatttccaactgaccatttccctctcccagatcatatttcagtcggaatccttccggtatatcacctatccgaggcggatatcgcccaccagtagtctccggactacccatcggtctcacggtgagaatagcggggtcacaggcggatataagcagctccccatctttggcaatgtagctgctcacataagtggcgttgcttgggtcattcatggcgagataactgaaccatacgatcgaatatggacctagacggccgtgaccccagtaccagctctggacagagtctgtaaaaggttgatcagaccaattctgtaacttgatcagccgaagtttcacaatttttccaccaggcggcaaaatcacttactttgtcatggtacccaggccctcggaacttcagcgtcgacccatggatctgcatgtcgacctcacccatggcgtcgggtatgagattgatccatccgatatgaggtgcaatctcaataacagtctggccctcttgaattccacagggcagattatacggtgctcgctttttggcaaatttagcaagctgtctgttcctgcgattcgagtcactacataccgaagtcaaggtaaaccgcccttcgacctgaagcttctccgacgcgacaataatctcatactgcgatagattctctctgagagcagcccagctaaatcccgtcgaggcccactcgccagagctattggtgcccgcgccgtcgacgccagtcacggtcgccacggtcgccgggacagaatcggcaaagacggtgccgttggcgaacgaagcccataaccaaacattgagcacggaggtctcatttgcatcgaggaatggaaacccttccgcggatgaggagaagaatgtgacgactagggactcatcggggttggtctccgagacggcatcgaaataccaccattcgaacacggtgccattgattgaatctatctggggtgcatctaacctggaaattgattctttatcaagagtggtttctggcgtaggaatgtcaaaccgagccttgctagttccattttgtacagtgctggggatatggtaggtcccgctgcgagagtccctgccagcacggaggagatatggcgaatgtctctcgttgaccctatgctgactagggaatgctggtgtctgttgtgctagaagagcacatatcaagagcagtggaagcatgatggaatacacctagggaagaatgcttgatgatggatctcaactgagaaagaatttagtctacccactatcaattgggggcggatgggaaaagagagaaacgaggtgaaatatctcacttgcataaggtgccaggatgcagcagagctgatccccatgtgggcttcgccatatatagcaaaaaggggaaagcagcgggatcctgggggaatcgattcaaaaagtataatttcaatttccatcccaggtcaaagagagatggcgatcctttactggtacggagaatccttctatcgttccttggtttcgtgatggcccaacacaatgatgtctattttagtttacaatggggatctatacccttttccccgaagacacaaaaataggaggtcacaagatccattcagtagatacaaatccatcttagacagattcactcatacgcgttgtctaattagaatgagacagccacgtagctacctagtgagtggctgagagaaatcagcatagatctaacgaacttccttatttcaaggatcaataggaaatagatagccaatgatgattgacaaaaccagggtttgaaagctgttttattaaataaattaagacgattaatatacttcgattggaattcctcgggatatcttccatctcataattgacgcaggggtgtttatataccgacattgcccatcccattaacatttcgcttaatcgctttaaatcacagagaagcaggatagatacacacgtcacacatgagtctgataagcacatatagtaaacataaatccggataggggaaaaaaagggataaaaaaaaaagttcagaccttcccatgatgcccaaatcacaaacccttcgccgaagctcgaaataaaagaaaaaaaaaacacaaatcaaagtcaaatccggtaagaaccccgactcccaatgccttggtagatacatacatgtcttcaaacatcacccccataagatatgcatatagggagagttcacagcaaggacgaaagtgtcacaggcgggaagactggaacacgttcaacctcgtccattaaggaggggactgccgtcttcactccgcccttcaccctttatatcggccccggtttggttgctattcgcatccgagtcgccgtcctttccgcagcctttcacaagaatatgtcgctgtcggcaaaagtcagtatgtgggaattgtcatatgagactgcagatgacataccttaagagcatccttgcgcgagaagctcttgtcacagtgcgagcaagggaaaggcttcacggccaaatgaatacgtttatggcgcttcagatcgtgattacggttgaaactctggggacactggtcgcatttgaacggtcgatctgccgcgggggctgccatgccgtgcggtggtggatggcccccatatagatgttgagagctggcgacatggccactgttgaatcctggtagaagcccggtttgcattccgcccatcatcgacatgggcccaccggggctgtgcacgttggtcatgacgggaccgttcatcgccgggagagaataggagggccatggctggcggggatatcctaagggcggttgcccggctgatggactgtgaacaggcattcgtcctggtgggtggatgccaagcccggtggggccatacatgggagagaagccggcctggtgaggactgtgcataggaggagaaacggcatacatatgctggtgtttgggggcatatggatcgttggattgcagtggagcgggggatgtagcgggtcccgcatggtacatggtcatggcaggttgtgacacggagggaggcatggttgacggggcgggtaaagcttggtaagataatgtcggcccttcatatgggtgcggcaacccatccgtcgtcggcggcgatattaccgatgagcgctgcataccggacgacggtgagaaggaacttcgagctgagtatggatttaccccggatccccaggactgtccgtatggattggcggctgaccaatatgccggcggcagctcggaggacgcgcctgtggaaggagccaatggctggggtgtggcgtgttcccctgcttgaattgtggcgggtggcgttagtaagttccccacgctcacattcactggcgcgtgggagactgggggatgggtaggatgtccgtacttgggtgctggcgcggcagcacccaacgtgaacgggggaggtgggagctcaaagctgggtaatgttggggctgcaggacgacgaatgttcaacggcggggctgacagcgcgtctaacgctggccccattcccgccggcgctgctagagtcgccagattggcggatgggtccctcactggtacgtagaattcggggtcgttgatattggagagctggccgaaagaagatccgttcaacgcccaatctcgatcgccaggtacggccccagaagggctggtagaatccaggaggggcgatcgtcgatcgctggggctcgcgatcggtatatggaagagagtcgagggactccggttctccaagaaataggggaatttccggagggactagagaactctcgaaataaagtgacaatggtaataaaagaaatccgaaaaaagacacgggaggtgagattgtcacggtcgacgaaagcgcgtgtagtacatggtctcgggggggagaaatgagtgaaagtcgaaacactaagaaagtgaagctgagaggaagagagatgtggggggggggaggtgggcaaaggaccgtggcgttggaggcgatagcaagcgcgggggaagtgttatactaataagagatgtcaggagttgcctaggtataattaacagaagaagcacaaaagtaaataagatggatttttctctttggggaatggagtcgacgcgggtctagccaggtggccaccgtggggaaaggaatgggataatgaaaacagtcgtatatattgtatattaaatagaaaagcacggaaaaaaaagggcgaaaaaggcgagcagaggggtgtcagcagaacgtggttgacagctaactaactaccggttggcttccagggctgttccggattgtcgactggaatttatattatttgtcttgatatatacaatccagggatttggtttcttcgtgcctactttctgttatcaacttcagaacaagatagcccacaatatatgtatactacctatttgatagctgaaaacccaaaaagacccttcttcctcgagggaaatcccttgcgtccgactgatcgcgtgaaaataaatgcgctagtgtagggactccggagagaatctgtgctagcaaaagagtggatccggctgagagaaagaaatttatttcgtttgggaaaagaaaaagggaaaaagggaaaaagaaatgggatccatacttttctactatcacggtaagattcccatccaataaggagaccaacatgtcaacgcacggacaagaccggaatggccagaatacgagaagcccatagagaaggcagaggcaagcgagcttgtcttgccggtcattcgttggaaaaaaaaaacacatgatcgcgcaattcagttaagctgctttttcatatttgtctttttgtttgagcatccctgttataatatacagcctactcggaccagaggtatattggagaccaaaccgccgtacctaggtatggtctatgttgtctatctctggtctgcggattatggtcagctgcacttcttttttttgccctttcagcccccaatagccaaactaaaagctcgatttgattggtccccggagttcaccggccgtggtagcttctttcgtttccctcgttttggctttttcgctctttttactttggttcgggccttaaaggtcacctcaactctcccgacctctttccgaaagccaatcgcctccagcatccactccctcgggtttccctcgcccatagatctatatagatactagtagtgcttgggtggcggaacgccaaatgaaacgggtctcggctccacgcgagaacctcgcttcagtctcccgacagaacatgtcttatcctccaatcaaccgacagagtcatctctttcgctgccttctgcacggacgtggcagatgcttatgtagggggaaaaggggggacatgccctgtcgatcgatatctatcaccgtagccatacgtactctgaatctacataactagacaagacatcaaacttgacagagctgatctgccgtaaacaaatcataacgtggtcagattccgaagacgttgtagatatgtcccgaatactccgcaggggccggtggttccatctatgcatagctggttccttggcacagcttagacatgtccattggcacatggaatttcatattgcgatccggtccgcatttcccccgtattcggtagcgagctcggtgctctcaaaaagaaaagaagaaaaagaaaaagaaaaggggggcaagtcttagacacgcggcggagtcacattcttgggaactgcatacctccgcctaggtatgtctagccgacgacagacacagcatttctccattattgtacattctacacaatccatgcaatatactgacgtttgttagacaatcccgatttatcttcgattcaaaaataaagtccaccgcgtctgtagccgcacgtcgcctgcccgaaaaggttgatatcagcgacgatcggttgatcatcaacaacctgtggccccatcgtatgctggttcccggttgatcggcctcgcactgccttttctcggtttggaagtgcaatccctggagctatggttcgcagccgattagtcgatcctctcatgcaaggcggctcctacagtccagatgcctctcccgatgtgacagcacgcaaggatccacctggctggttttgaacgccttagtgtcgcctgcattcggctcttgccggcgtggcttcggagaggctcacggttggcgttcacgatcgtccccgggaatggcgtttcgtggaaggttgactattcttctcgcccgggagatctgcgaccatgagtcttcctgcagggctgatgggtacaatatcccggcctcggtggatttgagggctcacattttacggtgtttccaaatatatcgactatacggagtaatgtgctgatatataggtctcaacctcaacaaagctaatagagcactggtctctccttctgtttcaagggctaggatcactgcttcccaatcagaggctaagctagagcctccctgtctcagcaaaaaaaaaattctatgctttttttttgctttttatctctctgtgggaacagcctcacgagcatttttcggtcgctgtaaaatctttccttgccgcagatctgcttgcattgtgttgccttgggtgtgataattaacaagagacgttaattttcgcatcgtgttgctctattgatcataaacttgaccgattcgattcgctgaccttatattagtctctcatggacctcataaagctagatttccggtatgacagtctccgcggtgaaacccttgagtggtctcattaagacctggtgacgtttgtgatacttgtaagttgttccctttggttgactgcaagaaataagagtttttcgctacacaggcccactcagtaccccagcttttcgagcatgttatctaactggaatgtgtaacttaaatctcattgtcaaccatttgtgctacttgtcttcggtgctgtatataaatgacatagaagcgtcggccatggtccccatatatatttccataggtcgattacccgatcgcataagagaccgaccaaacaggccagatggatcaatctcgggaattaagccaggaatagaaaataatatagaagacaatctaaatagccttgggatgttctaattgcatcgggctttgaattgccgagtgttgctccgatgacgtcgaacggcggggtacaacaacctggagtttcattcctacattcacagggttactttcttcaacttcgcttttaaatcaaaagccaattactcgtatgttcgtttctcgtccaaatcaccccaaatgaaatacaggccatttctgaccttccaaagaccattgcttgcaactaaacaccgctttaacacacctcccttccattgcttctccacaaacatgtctggaatcagcaaagcatgttgctcgttcgtgatccccataaccattgcactctgtgatgccccaatttcgcgctgactatcaccgtgcacagaatccctcctattgtatccaagggctaccaggccaaaggagaatataaaaccatcaacggcctgaagacctgttggttcttgctttcgccgacctcttacgattgagctaatgaaattactttcagatgtcaccggcccagaatcggccaccaaggctatcctggtcatatatggtaagccactccccacaagaatttcaacctggccattaactgacacaattgtgtgatctgcagacatcttcggtttcttcgaccagaccatccagggtgccgacatcctcgccaattcgaccgaccaaaaatatcgcgttttcattcccgactttttcgagggtagccccgccgacatctcgtggtatccccccaccacccaggaacacaaggagaagcttggacacttcttctcaaccaaggctgccccaccccaaacactctccaagatccccaatgtcgtcgccgaaggcaacaagctagcgcctggcggcaaattcagctcctggtcgatcctgggtttctgttggggcggcaagatcgcctgtctgtcctccggcgctgataacaagctattcaagacggtcgcgcagtgccacccggccatggtcgaccccaacgatgcaaaggccgtgaacatccccatggtattcctggcctcgaaagacgagcccgcccaagacgtcaaggactttgaggcaaacttgaaggtccccaagtacgtcgagactttcccaactcagatccatggctggatggctgcccgatcggacctggagaaccccgaggtgcgcaaggaatacgagcgcggatataagactgttctcgaattcttccaccagcacgcgtaaacaacagaaaaaagggcatagttgactctggggagttccttaccgcggaggtttgatggtggtatgcgaactagatttgaatggagaatgatgtcttatgacaaaccaaattaccttcctatgcacaggtacacatagcgtccttctagtgtatgcacaacaagcataagccgtataactttgacaaaatactattattaaaaagctaaccttgaaacaaatctcgatgactcatgtttgaagatacataaggtgtaaataaattacttgggtataacgacatgtagccgagcatatgtaatttaactagttcgaacataactatgtacgtatacatttgatatcgcatacggagtacgtccggagtacctaagtaagatatgtgcatatgtataactaagtaaaaagtgttttactttttcgaatgacccacaacatagttgcactttgtacaatccgccagtcttccaatatcggccaatcatctcattcgcggatggcacctagacgggtgcccaggtggatataagttgtatatatatgagtccgcaagacgtcatcactttccgaatcttaccttaaccttcttaatcttcttaaccttcttgatctccttgatccccttgatccccttaagctaccgttcctttattttacaatttaattctgggatctataaattctccgaagtcgcttaagttgtgcattcaccccccaaaaaacggcgctctcacctgtcgcgtttcagctttcagcgtcaccccaccagccgcgaagggcggagatcggcactccgcatatacttgatttatttccacttcttaatcttttacttttaccagggcattctatctagaagatgcgataattgcatcttcacttggttctaatgtcttccatgtttggccgccgtcgttcctcagatgcagcttctcctcctgctcacaatgagtttgagtcacttaagcgatcattatcgcatcgccctcccgactctccccaagaggatcatcccaacaacggggggttccgaaacctatttcggaggcacattaatagtccagacataacttctccaaccgcaacacaagtaagaatgtcttaactattttgtcattagaactgttagctcatgcgaaacagggaaaagaaaaatcaagtccaattgaggcgagcgcgccggcgccgcccaaatccccagaagagagtagtggccggcacgatgacagcaaagatccccatggcccccctaggcacgactcgcccgtaacaggggccgagccaacgcaacctggaaatatccatgatcatctcgaatccagattggagatggcgggcaaaccaaaagaaaacttgcctgttgcccaccacaatccaaaagaggagactaaactcacggcgaaagacatcaaggcaattttttctggggcacctcactttatgctggagagaggcaattatcatttgtggtatccccaagtgatattcccatgggatgatcataacccggtaatccaacacatgtgggatcgcaagccattaccccatgcatcctttactctgagcacacttcacgctcatctgccgctcccagacgactgggctatcaagggtggcgttccgatcaaagtccttgattggcgccaaacagacgctaccaacagggcaacgttcgacgtcggcatcttcgaagtacccaacatgctgtctaacaatggcaaagaacctggaaccgtcggtttccggcactttctcgaattacctgtggccgacaccgtccgatacgtgggccccgaaaagccaaagaaatctccacatctacagcaaatctcgaccatggcggcaaccgtggcgtttgatataatggagggatatggaaaaccctattcgcaatgccgaagcggtgccgtccacgatcgacataaactcatctgcgaaggccccgaggcctggaagcgcattggagtacgagatatcaaccttcgaactctggtgcaacgcctagaacatctgcgccagtttcgacatgagatgctcacagaggggtcgacaaagacaattctggatattgaaagtccgcgcgagttgcacgacagcttacacacacaattccttcacccccaagctgccgacattatagggggtcatgcgcaaagcatcaaatcccagatcaaaactttgtcaattgtgctggccaccccaggcgcatggatcaatttcagtctccccgaatggcgctttcgcgtagggcaggtcctatgggaggcatccctgcatggcgatggggactgtctgggccccagttcaggcgatgagaaagtaccgtgggatcttatgatcaagtccgggatggagcgaaagtggttgctgatacagatgctcctctcggccgagttgcttcttcgcttggatgcgttcgttcgagctggcatgttgcgtgatgcgcactctggccatatcacgatgcgcgagcttggagaattcgagaacttgcgagacggcaaactgaactgggatctggttgttgtgcgccggttcctcagcagcctcgatatcagttgcccgccgccacaatcagggctatctccggatggctcacgattgaaactcgcagccacgaagtcgcatcgtttttcacttttcgaaaccatcagtcgacatagtccgccccctgttgcggatctaaagtccgcctgggactgtgaactgagctcttcgcacattcggcaacaactggagggtctgtatgtcttcgcagaaaacgttggatggccaaaattggctgcactgaaagctgccatggagttcaaacttggagaccctcacaatccggttctgccagccttagtcgttcatgataggtggggatgggaggagatatctcaggagatgttactggccaaggaggatatgtacacacgagatccctgccgtcgacgcgtcaagcttagtggctctggcgatccacagtccaaaacgttaggctggatctcgcgctcctggctttccgggttcgtcatacctggagaggggattagtcatcttctcatggcgacgctccttgagaatgacgcggatgcaatggataaactgggatcaattgccaacctctatggagggttcgtctatgaccaacggagttggtggagcaaagcatgcgttgccggacgtgtcttgtctagttcagcgggagctaagacatgcatggggtggatcagcagcgacattatcccccgcgatgcgattacaggggaaatattccagtgtggatggcttgaagtcccggttgaagaggtcttggagatttcgagcgtacctcgaatcaagcaaggaaccaagcttgcgctggaatcgtcgccgctaggcgcgggagctatctcagcaaaggcctttacacttccaacggataatcctgagccaagtgcaatatccgtcaacatcgaaggcttgaatctgtctgtcaaggattacaggcctgccggcgagtttggaattacatctgccgaggcatccatgtcgttcttaattggaggcgcaggtggcgctggagtttcaactacggtttctttccccctcaagtataatgttcgctttatctccgcccatgagtgctgtccaccgttggggatcgcttctcacaagccatccgaccgcgagaacattgaaacccaacggcctacaaaacccgtgtccaagtactcacgtctaccggggcatcctctgcacagctcttatcggtacaagtacgtttcgttggactctcttccctctgccccgacgccgcaattgacatcgctggtaaccccggaggcaactcataccccggagattattgtcatcgacgcgcggggcaaccgagacagggaaacgttcgctcgggcgtggtgtgcttctgttgggtgtcatgcgatcataagtcggtccggaggaactcgtgtgacaagttgtgtcgcgtgttcgataaggcaagcgagggcgatggatgtaatggttgtggtacgtgtgagcgaatgaggtgaatcgagttggtcgcgcatgttgctacttctggaggcgccattcggggactgtccgtaatagagcccgaaacacaaaaggtcataatcgcgcaaaccgacctgtttccatgattgagtacaatatacgaataataagttcacggacattggcccccttttgggaccggaaaagcctttggtggcttcaacgggtttcctctccggagaagccgtgggggtaaggggaaaagccctcccatcggagaacgccagctagagaacggtaaataccaccttccttttctcctccagctgaaaacaaataaaattttaaaataaaaataaaaacgccgcaaatcgtgataggggggaaacggagagaggaatgggctttttcttgggaggacgcgtaaggcaggttgcaggttaaaaagggtgaccctcccccttgagggccgatggccgaatggagtcaagggccccgaagatggtgaaacagtcggtctaaagctgggaggccagtgagatctctgtattatgggtccacagggatagatatctccgatctcacacaatttatggcatgtactctgtagttggacgatgtacggagttctgttactatatatatatatatatattgtatatgaagcatcttgtaggtagaggaaactgtatctcatctgcagagtcctttctcccatacatattagatcatatcgtcttctcatctgcatactcatgcattcttatgcaatgcagtctcttgagcaaattaagcctctaccgagacttcatggttcagggatgtagagcctacggggtagacactccaaaatggcactaaccccgaaagtatcctggtagaattaaaccatcggctattccgtttcctaaagaacgatcatggcagcacgcctagtacagtcaagcccgttacaatcgaaggatcgtcagagcaaatatatttcgaaaccgaaggtatttacgcccggcagaattccaactaaaaaaggcgggacatagcactaagccaatagaatcaacccaatctacccatcacgtgggcgttaagcctaaaaaaacacattgaaaagaaagtttgggcggactaggcctaattgggaagcctcggcgcatcaacgatggtattatctaagcgaatcaattcagggctggcgcgcaacttctttggatattgtcgaggtttacaaaaaagtgggtcgatttcaacggggttttggctgtagctcatagggtaggaatacatacctgcacgccactgcggagcccggcagttgggggttggggctttgactgctaatcccagaaaggaatagttatgggtatttctcgaattgtacaagactacaatattaatatgtacctaagtaggctagttggctagtagacgtgattaagcgacatctgagactgtaagagtcttctacatctatccacccacatgagtgtaactattcttggctaagattagcaagatctggctcagccctggactggacccttgtttcagtttcaaacactttggccgatcgacgacgacgcgacgccccgttgggctttacctaattattcaagcgaaccgagtacgaacattcctgctacaatatgtacggaatatattgtaccaatatattctcgtatgtgtcctatttctgtatggctggtgctgcaatatatgattggagtcgcttgcctcacactaccccgtactgcaagatctatcgcatttacattcgccgcgtcacgatacatgtactgattgttcagctgcagacaaatcccagctgcaaagagtctctgttgtaagacccaatagtatcggctcttgaccatttctcaagaccccgtgctcgtcgatcttcgaccagtgtgtgttaaattgcggggccagagcgtgggaagtccagtgttggatgtagtttatcttcgcaaaatggcggtggaagcatcccattaggcaaaagcttgaaggcacagcatgtattggatagtatgtatacatgagactctgctggtgaattatacgttgtcaagtggcttggagagcacgagagtacggtgatcggtggcgtttattggccttgaggggttttgttgacgtgatacgccatacaacagtatgaagatcatcgtccactccagtccacttgccagaacgatattcctcaagccacgccggacttgacacgttttcctcttcattttaaccagtattcgttgataatagccaccccctttttttttcttctgtcatctgttcgaacaggcacattatcagacggagtataataagcactgatcttttccattcaatcagaaccttcccttctattgtatgatttagccttaatggaagctgagacagaaggaaaaagccccgagatgagccccatacgaataccaagacccaacctgtaacacgctaccacatccagacgatccttaatcaaaccttgacctgccccacacagagtttgtgagatcgcttgcaattcgcattttgttacctatgctgtactatattatattatattattatttgtagtactccgtagtctgctagggctttcggacggttatcctacttgggtgtagttcagggctgtgtagatgcagatttatgtctaccgattggtttgcaaaatatatgatttattgtagtagaatcaaatcttaaagggccacgtacgtgtttctagaaaatgtcgctcactacgccatcatgaacgttgaaacagtgagattgtcctatgagcattggatgcacggggtacaattaggtagagactgctcatccgaacattgtggttggatccatgaagaaaggtccgtggtcactgattggtccactatttccatggatcttttgacaggtttcctctttttttggcctgataaatgcaaccaaatcggattaaagctactggaaaaggggcaaaaccaaaaccacagaagataatttattattcttttttagataattcaacgttatattaaacaaaccacaagaaaaaaacaaaagaaaaaggatccaaaacacgaaccaataacctgatacacatcaaccgtggaccctgaatctgtttttagcacaaaaataaccgatggttcgtttcagttcatatcatgttacggagtaaaatatgggatagcgtgatttccagtcttctagaaggccatgtgggcaacacaacttatgctttagatcgaaccgcacagctccccttcgagaagccccctgggtttctaaggatcagcctgtgaaatgaccggagacagaaggttcttcttgatggaccctcaaatcaacgagcctattggttctgagtgccgacctaagctcgcgtcactcactaatcacctagtcgggacttgaaggaagcattccccagttcatcaatgattgacaggcatccttgttggccctaagcctaactggtatcgtacactttgagcggccactccaacatccacacatccccactgttgtcagggctcccagaccatggttccttgtctctgcttcatttcaagaaccgggtctacaatacgcaatcaggggcattggaaagttacctaatcaaggacggatctaacggtgacaggagtctagaaaaaaaaaggagctacgtaggtgaaaaagagattacgaaaaaaggatcgaaaaggaaaaccttgcagaaaacaagaaataccattcaaacgccagtaaatctagagcattaagggaagttatccgcggacccctgaactgatcatccattgacaatgacctgcagttgatttgggctaactcgatacatccgtgttagtcttagttatgagagccaccttgttccacgtacggcgtgatatacatgcttgaaaattaaatttaatcaaaaatctcagggaaaaaaaaaaacctcccaaaaaaaacccaaaaggcctttgggcgtttcaccccgcgattagcttctacctattggactatacctaccatcttcgatctgctcttcttctcttcacaccgttcgcttcatattcgctccttttgaataccctaattttgttttctttttttgttttctctctactaatctctttttggttatcgtttgactcgtccccctagtgtggtttcttcctcgatctcaaactgggccacaataaacttctaggccctaaccccgtccaaatccccttccacgaacactttactataattatcattgattaattcgcaattgctggacttgggaagtttggaactcccagcctggaatcaatctatcctcgaccattctactgcaacatcacctctatacttggagacacacgggccctgacatacgcccgacatcctcgctctgaaacgcgcgcaatatcatacttgatccagtgtggcgtatgtggatcagaacttgagaattgaagcagcgtcatcctctggaggcactcatcggtcatactctctgtgcagtatttgtatggccttgcgcggactcttgtcgcatacacctttgatcacatctcgaggtactctcggccggctgcttcgcaaatcacacctttcgcttcgctgtggcttttgatgcaccctcgaccgatacagcgacagaaccgtgctcgttggagctatgccagtagctgtcgaccagatgacatcgacagcaaactcacaaagcaccatggacgcaaatgataagaagcgcaataagttgggatatcatcgaacctctgtcgcatgtggtcagtaatatatcccacgcacccatcgcctgtttgcttgtcgcctttctctcctcgttttcgaagtgcgaaactgtgtcgatcaggaggaaataaacaagccatcgtttcgggaacggggtattcacatgtgaccatgttacttatacctttacagtgcactgtcgacgacgaaagatccgatgtcttgtagcgccagatgatacggaaggacgatgtgaaaactgcattcgcttgcgaaaggactgtcagttttttccagtggaccagcaaccaccgattgaaaagaaatcacgaccaagctcgagattggagacaccctcaaccgagcgctcaaacaccacaccaattgcttcctctccgactaatttgatgcccgaccccgccgagactttctacccataccagcctatgccgatgaacgcctcgtctgtgcaggacatgtcaacgtacaacgtcggaatggttcaagccaatatgagtctaacaccaggtaggtttatgtcgtctagacttctctgcactgcaatccaggttcattcgttgactgactgatctgaactagatcgacctatgggaccaggagactttgctggccatcaaccaatggacacgggggtctcgtgggacgaatttacgactatagcggacccgcaactgttgaatacgatggcagccggaaaaggtcatatgatgaatatgtcacccaacttatggaatcccgggaccatacactcaggcctcccacccgcttccccgatatctgcagcatcttcaatgggaggccaagcacagcctatgagccagacggcatacgctatgcagccagatggaacagtttggcaggtcccgccgccaccaccacgaaccatgagctatcctggacaggaaatgggatcatcataccctgatcagtttcacccacaactgcccccggagctcaaacggagaatgaccacacccgcacaatctctgtctgccacgagtgccatgggcccacacggctcgccaggcacacctgagatgcatacaccaggatcggtttcatacccaccaggaatgagctacccgcaatggcaggatatgagtgccatgtctggaatgagcgtggtgccatatcctatgtactctggcgacacagtcccacaacacgcatacccgcctaatcctgctcctatgggacaccccggaggcccgtcaaagccatgaatattttcattcctttcttcgacatattatacctcctctcccacgcctaacttttttttcgcatttattcgagtccaagttccctcacgttgcacatcacattcctagacagcctgtttcatttctaataccccgcgggacgtacacatactttttacccccaattggcatttcatctattttcacctcatcctcatataccgtggcgggtctgctttgcagctggtcattagcgggcgcaagggttttcgggtggcatttttactatgatttcttgtctcttccttttctatcatggcttcatcccaccttttcattttctatccatttcctcgggctctttctacccggtctgtttttgcgtgcttttctctatctcatctggtggtattttacccttggttgtatgcggtatgtttgtttctggccggtggttgtctggattggagtgtgatttcacctcatatgttggagcttttctttgggccatcgatatagacttccttttctcttcgtttcctttggacaatttatgtgtaatcttctcaatacatgatacccttctgatctctgtcgcttctgtgtcatcaggaagatgcaactcctgcttgcgggaaagatgtcgaccagctcaacaaccaatagaattaacggttggagggttgatacaatcttattttctctggttctttgataaggcacaggctggaaatgcataattcttgtgtacgtatttcacaataactgccctgcatatctatactttatcgtaagactcggccttttctccagagttcttgtctatcctcaatgtactaagagcctacctgtactatgagcttcttgtttcttgcttacagaagtgtgcatgtatggtgcacccttgctatcaaaggttcattgtaggtcacacaatcgttgtacggagtactccgtacgaagaatctcgcttgggtcgattatttgtggcaaagctaagacaaaaatgagagtagtgatgcataatacttcgcgtacaaagttaacacgtcatgacttcttgacttctttctcgaagttccattggcccgggatccttcaatccgcacacaaaagtcaagtcgggttattagctcgcaagagaagccaatcaaatactcgacactcgtcaatagtattgcgtctgggagggacagtttatatccctgagcacacgaatatgccaaggccatccgagtccgtgataacaaatcctgacacagatagataggcagatagataataagcagatagaaaactgggagaagttctgataacaaatagccagcattgatttgtacgtcaatgacctcgcgaatgcgacttgataggacacttgcaggaagatagaataaagaagagattggcaagataaaccagagcattcggattgtcatgtttgaattttcccttgcgtgatctgctaatagcgtcgcgtcagtgttgatatgccagattgcaccaataatcccatatctgcgcgagatgtaaccgggaacctaagattgaagatcggtcacatcagagatatacatacatagtcattatctcacagacaagagttgacgtaggagataagggtcgattgtccatttacagcatagcaaattaacgccctagatccgcattggaggatcccccggagatcgatatgaagtaagactctggggttgaaatctggagatagcagagtcacagcatggcggtgtacaacataggtgatagatccaatgataacgcatcattgtgtcaggaaggggccttatctccctctgcacgttcgaattttctttggagatacctaggattctccctgttggttgcgatatcagtgagcgcatttttggcccccttaggtagcgtcacgtcttatcgagacgggcttggtagataaccacacggcatggcgtcaatgttcttgggttgttgagtacaacgtatatatagtgcattgtccctcggggtttccttttgacttcggcttcacttcggtgccaactcggccaactcggccaaattcaaccaaattcaaccaactcggtcacctcggtcaactcggtcggtcaactcgactatgtcaactcggtcaaatgactatgtcaaaccatcccatgtccgttcactcaaaaaggaacccatgtttagtctccttgtgtctccacgcttttggcctctaggtaaacgcttctatatggaatcagtcaaatgcctcaaccttcctaaagattttctcgcgtaaccgcaagaaccgcacagaaaaaaaaaaaaaacaccgatgtgggagaagaccgccaaagtacagagtcagattggcgtcgcgggctgagtgtgcaggacgccacggcccacctccccagtgcctcgagggcaataattgcccaatgctttcccccgcgacatacatctccgggttggtccgggtgcctgagacatgactgtgctttcccccactcacatccccgatccaaaatggatttgacaatatgattagaaacatgtatgacctgaaggtcaggtactttatgctaacaagaagagataaggtccaaagttccaccgatctgcattccctcaaagatgaccatggttaattacattctaattacattcctatcagaaccttcttatctcggattccccgacttgaggtggatcgtggggccaaaaaaaaaagagtaggactccacggcatattggagctgattactctgaaggtgccattggatgggaaaacatcgtcttgtttaggcctcgcgtgcctccgtatcccgatccgggttcccgtctccacatgatttgagtcgaccaggctcccggggacgtttgatatcaaattgacacggaattctgagatcgactcttgaacccacgaggatggccggagttgtaccataaacccgacttgttagtgccgcggcggtggcaaactcatggaaagagagggaagaaaagcagggatattaaccggtacggaggtccgcctcaagatcccccgtgaaggcgggaaacagaaacgaagaacgttgatttgcgaagttgtcggttgccttcttggtactccgtactttacctcggatgggggcgaacgtcggggaaattccgtgacaggccgtcctgtatatcttctccgtacacgggtggtaccgttctcgggtaatatagggatatctttctgagcctctcggtgagtctcgacatccgtaggtgggattgattgcttctatattctatttgatatggcctattatggattatgtgcgagatatgacaaaatcagttggaagctgtgaaaagcagtccgaattcgcttcttattaccaagagaaaaacgaacaagacttgtagaacgtgccttatcttttgagggcccatccgttactccgtttactattccgccccgctgcgctaagagcatggactataaacctcgatattaaaacatctgatcgtgcttttgttcctgcggtttcttcatgggtggcccgagagctacttcgtttgtctccaaactgtcctgtagtctacaatatcccgtagaacaagagacggagagatcgagagcgcatgcgtttgttcgctttcatcccacgagacctctttgactggaccgggtggtgtactccaccattaacgaacagtacccacttatcctgcatctggactcactccggggccgctaaggaacatgatgttttgggagtgccatatttctcctcaagcttgtccgattccaactagccataggaattgatagtacctgcgtttggaccggtcccgactcacaggagcgggcaaggtacattagtttcaattttagtacggagcttgcgaccactcgggccgatgattattcaagatgccggtcacatctatagttaaacttggtcaacaatacggagtacccatgtcagaaggtatgccgagtatgcagagaaagaaacgatgcccttctagatcccgaagtactccatatctccatacttgattgggggaaaggtctcaatcggtcttgtacgtcgcagtatatgcaggcggaaaaaagaaagaaaaaaaagtaatcggctttgaagaagacgggagtggcacatccaaatcatggcaatcgagcgaagcgccgtaaatcgggcatttccccgtgacaacagtaatactggtatgtcaaattacatatagattacatagattacaagttacttcttgttcagcgtcactctaggccctcttttgacatcatattcttcttcttttcctcttttcttgactttatttctgttcagttttatttcaatatcttcaatcctgaagtacgtctgattctaactcatacctggttattgtcgttgcgtggtcggcagtaaaaccaactgccctccgtttccccatcttcccacacgtttcccttctctcctccctctccatctttcatctttcacctctctccattctccgtcttcccttcggtcattcttgggaggattttctcttcccatcaaaagatagatcttctcggggcatgagcgtctggagggtctagccccccctccacgactcattaggaaaatcccaagtggcgttgaggctgggtggtggtttccagatccatcgtgcgttcctctcatcccagtcgtcagtttaattacctattatcatatattattatcataagatccgtcccgtgctaataggcattttacgttgacagaccctggtcgttggctgaatcctgccaatcgtctctcgcttggctgcattcgatcatcaacttccggcaagggtctcgtttacggcgggtacggaggaatttcaatccaacccactttttttttgccgttcatcccctccccccgcggtcgcctctatttgaataacctctttcctctcattgaaaccctacccatcggagattatggacgggatacatcacggagggcacgggagagcccggccttcccaccctatggccttccccgacttcgacgcggattcccatatgatgtccgacgacttctctttcgatactcccttcagtccctccggttcctccaatgccaatgataccgtcctcggcaactccatctttccggaatggacgaacggtgcgtcgcgtggcgacagccctgacgagatgcaaaggaaagatccgctgggcgctcagatctggaaactctacaccaggacaaagtctcagttgcccaaccaagagcgcatggagaatctgacatggcgaatgatggccatgaatcttaagcggaaggaacgggaacagcaggctcggtaagaaacactcttatgaatgctaaagcacatggctgatttactgatgtccgaatagtgcctcggaaactttaagcccgacaccgagcggcatcgcgcagatgcgcttgtccgaccaaccatcgcccgctggtggcgatctagcacacgataccacttcggatccaatgaatctagatgacttcatcgttccctttgattctcccgccgaacattcctcgcatcctattgatcgacacttcacagcaacacccactggatcaattcctattaaatcgcgcaaggaccatgcgatgatggattcgtcgaccgctgcctcattccctcatccaccccaggatcagcgaacaaattccgagtttggatacgtcgcccgtcgggtccgcaaaacgagcgtcgacgaccggcagttctttgccggtttgtctgttccgacgcgcaagcgccctgccgaggcctcgcctcaggttcccccggtatcaaacgccatgatggcacagcactcggaactgtcttctgcactgccagactactcgctcgatcatccaccttctgcctatgctctttccggcaatggcacggtgggtccgcgcagacctcaacaccatcacacgcactctaacattccctacgggttggatacgtatggcattagcgaagatcacgggctcaattcggccggctcataccagcaaaatttccatttttcgccgtcagattctccaatgactgcaggaaatcctttctcgagtctatatgcccagacgccgctcgcctcgtcgcttaactcaaccgagttcttctcgcccccgccttctggctatcagtctactgtgtcaaccccgcaaccgatttatgaaggggagcaatcgatattcttttctgatgcgccctccgctgaatcacacacccagcgccgcattcctaattatatccagcagcgccagtcgaacctgtctgcatcgctgcagccacgttatatgtacaacatgtccaacggcgaatctcactcagggagtgcagttacagggccaccaaccacccacgtgtctggattttcggtgccaccaccgcagcatatcaacccatcacaggtgcttggccatggcgaattctctacaacagcgccttccagtagcatgtttactttcggtggagactcagacaacgaagatgacgatggcaactttggtgaaggtggaggcatgactatgccaaatgactttgcctctctggatgagtctggtgatatgagcgccggtcttcattgggacgggggtttccccggatcaatacactcgctaccaggcttcaatgctcagcaccgtaagcacgttacaataggatccacggacatgatagatggcccacctgaatggaaccagggaggcactcttggtcgtgcgcacggatccgctgcttcggtcagcgaagtccgtaaccaaaaccaggatcctcgtcgctacggaaaggttccccgcacagcatcgacgcccaatgctgctgcactactccgtcagagcttgaatggttcagccagtgggcctccaacaaaccatccttcgccaagcacccctccagagtctggtcttagcagtgcggtgccgtcccggccaggtagccctggtgggtcgaaaaacggtgacccgaacgcgggaccgaccacctgcaccaactgtttcacccagaccacccctctatggagacgtaatccagagggccaacctctgtgcaatgcatgtggcctgttcctgaaactccatggcgttgtccgaccactttcgctcaagactgatgttatcaagaagcggaaccgtagcagcgctagcacacttgctgtcggcacttctcggtcatctaagaagtcttcccgcaaaaactccatccagcatgccccatccacatcgatttcatcccgcatgaacacttctgagtcgccaccctcgatgaatggatctagctcgttgggtaaaaccggtgttgtcccaattgccgctgctccacccaagtccggtcccccggctggcgttgctcaagctcgtgctggtgtgcaagtggcacccaggcggcagcgcagactcgaaaaagcaccaactggatccgatccagatctagaggacagccctaagtcggccgctcctccgagccgatccaaagtcgtaccattagctccggcgatggcaccacccgctgccgcaaacccagcgaatcacagtatcgcgggtgggcagggtgcgagtcaggaatgggagtggttgacaatgagtctatagttggcttctaccacatggtccttttcttttgctgagttttgccgaggtgtgaccggttaatcacctctataatttcacgtattacacgacttatgtccccggcggtcgtggctcctttattactcccatgttttcccagattattacatgtcacgtgtccctttttttttgactttttgactttttgttgatttgattgatacaaccgcgtctgtccgggacccgagctgcttattatgtcctcattcttatttttgttttcttgtttcctttgttgtctcgcagctcggaaccgggcagaagtgcgcatctctctctgcgtttgttttttttttttttttttctttttttctgttattattctactcatctattcttggatttcttgcgctgctgagcaggctttgattaatggattctgttatccttgcgtgattacttctagacctggacttcaatatgaccatgattttctccaattcgcccgctctccacgttgattgagcttaccacctctagatgtaattgagccctaaactattttctttccatcactaactgcaggctgagcgaagaatgacatgacagctaacttcagcccggacattaatccggggaaacaatttacgtcatctcgacgaatagttgggctgtactacttcttcgagcttcctcaagataagttacttttataccatacaaggccgcagtgtattttatccagcaatcaaactaacaccaagatagctggaaaggtaggatggaacttcttttaattaacatccaacacattgacatggtgaagctgattctttccaacagggcaacatgtctaacacggacggtgagtggctgtctcgtggatttccttagatatgcagaaccctattcacacataatagaagcctcggaaccattcacaaccaagaccaataccacagatagggtcaccggccgcgtccatgagtctgccagtcatgcacgcgagaagatagctgaacagctccaacccggtgcgtatttcgagcggcgatagcgcgctggctttgttgttttacgggtacggcgaatgacgtcggatctggagtcgctctacgtgttctttcttgatgccggctagattactgattgagttctgcaggagatacgaaggcgacgtctcgtcgctcttcagatacacccgataatatctggcaatttggacagggtggtccgagagaagagcgagattatgggctagagaggaacaagtctatactgcagtccgcgcaggagacggtggccaaggcccttggaggagggtctcgtggttagttgctggtgatggcatttgatattttggtcttgctgatgaaattcccaaggtgcaagctaaatgcctctagcaattccttcattccttctcctatcctttgatttcaagaaattattcatcaagcttaggtgattgcccgctattcatcatactaagagtaaactgctttcagccgtgccaactttcctggcaaatatgcgtattgacttttatggcgggtttggattagtagttagatatacttggaaatttcaatatcctctctctttaattggctcccagcctttgtcctctctatccagttttcaacaccagtaacagcaccaaaaagtgagttcttctgctccaataagaacgacaaaacttcagctagactgaaaaattggtctggcaccatggaagcaaagttgtcggcaagctgggaatgcactctcttgtctgcgcggccaggccgaatgagtgcttcatccagatgctcgatatgattggtcgtcataacgagcacctgaccttcttgagacgacacaccgtcaagaacattctagcacaagtcaacagagccgataaatatggaagttatccagaagaatgaagcattcagaaggattgatggcaaaatgaaatttctaatgtccaagtttttgttcggcaagatggcatattatattccggaaaatggacgaatcgattaaattcgccaaagacgttagacgatctctaggaaatcaagcaactgcaagttagtacccgaattcgtccacgggctatgggtagaaagcccgattatatatcgagttgagagctagatgcccgatttcccggaacattgcccaggtgtacggcaggttttcccgttcgggaaaattcatgcctcaggcaataactgatatgataagtcacgtgtgataatcagagcaaaaaaagatcacctacagccatccatcttcaatcaattgacattgcgcagccatgggtgccagctctaaaagaaagaaggataagcaaaaggactttcaggttaggattgtgaatctccgtttctcttgttcaacctactaacttctgcagaaacctaaactgaaggttggaaaaactaaagcgaagcccgacaactacactgataccagtttcaaatcgaagggtatgtgtatctttttggctgcttagtatgtggttatgctcacgattactagctattgtcctcacgcaacaatctctccaccttgctgccccaactgcaaatgccgtattcacgcataacttatctctcctcaacgccaagtccgacagccaacgacgggagtcgctcgcttatctgactacgacgatatcatctcggccagtaaactcgcctctcccacaaccagtcagcgttattctaccatctctgctgccgctcatcctcgatggaagcaccagtgtacggactcagctcctcaagctcttgcggactctcccgccgggcgatgtcgaagaccatgtggcgcaactccttccctacgttcgtgcaggaatgacccatcttgcagcggacatccgtagttctgctgtggagatactatcatggatggtcgaggcagcgggagaatcaacagtttcctgcgcgggaggatggatcaaaacactcaactgcttcttgtctgtgttgggctggcacaccgaagagtcatcgcagtggtcttcaagccgggcttcatttgggaagtctggcagccagggcaagcccatggtcaaaacgcttgggactctggcaaagttcttagatgcggggatcggaaacccttctatcagcggtgtcgatagtgagatgtcgggtgatgatgagagtcccgactggccgtttccactttgtcagaccgcccaacacatgatctcagactcatctaccccattcgcttatctgaatctgtttgggaagccgcgtgatgaggaaggagaaatgtacgaaacccgtgaggataggtatcgcgttttctcgactcgtttccagtcagcaatcgagcgtggaatcaagagcgccagagaggaaggcggcgaattgggccgtgcatcatccggtgtgactaaggtgttaaaagaagcgattgcgtacggacccggcccatgaatttttcagccaaggtttacgagcaaaaccaaatccatccgatataatggtaccgtgacctaggctgggcctagagctttttgcgggctttacctataagccaccagtggaacacgcatccagttcaagatttctcggatatcatactatggtgtctgttttaggcagatggcctcgccctgcgaaaaccgagaccggcgctgaatagacccatcggtaagcccttcggccaggggcccttgcagcaggtaaaagcaagatatatacaataccaaggctccaagccaaagccttaactggaacctcatatatcttctcacggaacattgactttagtcattcatccccatagccttggagagcgagaaaatcacaagcaaaataatctaatatcatctatagaaaattcgattgttagaaagagaaaaccgtatttttatttcttcgtaaacgatcagaaggcaaacgacaaaagtgcggagtcctattattagataggctctgaaatgctgtatattgtacatgtacatgtactccgcacggagtatagaatatgtataccatttccaagtcaattcccgatcgatgcccaaggactaaaactatcctgtttgctgtgatgtgtgtgttagactctgtctcttattcgcttatactggtttctttacggtcttggaagtggatatcctttaacatattattggagacaaagaggggaagacttgacatgtcttgtagcgtgggtctggcacttctgcatttttatttttatttttttgtttttgtttttgtttttgttttgggaattcaggaccacgaaattgagtactacagatgtgaagaagagcgttttttcggagattaagtgcaggaaatggttatggtgtacaaagtactccgtactatctacaatatgtaggtaatgtgtgagacgtcaaggcaaggggttcacttcatgattcattcttccagaatcttatttcttttcgttgaatgggtctcacatccaagtttctcattctcacttataatgccggtatagattaatagttatgtagtacggagtagtgttcccacattgctacatattattgacatatcgacatattgtatattgtatattattattcaatctttgaagtcattcgcattgatcaatatgttatgttattgaccccctatgtattttcaatagtctaagaattgagtgtgagctatctcaccctctctcatttccccgatttacatgtacttccccccccccaaaagatcggccatgatcgactgtctataccctcggatctgcacaggtccgatctaaattcttgctttactcgggaagatcatgctaagtgcttggcttgaaaggtttgttctgttggatctgatacctcacatccggcggggagcccgggttacggagtacaggccggcctgacgttttcttttctcaccccccttgcattctctaaggggggcaggaaggagaaaagccaattagtgaagagccgttcgattgacgattggtctatggttggccagcattgtccttgccacaataaacacaatgaggaaaagggaccgaatccccgacggcaacatgcagctgcattggcacgcccgagtctgccatacaagcgttgtgtcatattacctgctggatcccaaactatacatcgcgagtgccacagcatgtttgatggctagagttgcctagtctgaaaagttctccacaggaccttgctcggacgaatccctttggaaaaactcattttcatcatctcttcggattcgtactaccgttttagcctcaaccaccctgtatatctgcgcctttccaggttccgggaggggcttcctgggactactcctgtgttcgttttagttcaaggatcccctccaagtaaggatgcgacagctcacctgagatcctattaaactctctccatttccgcctcgcagtcccaagttttgttcgctcgttctgattctcccatacagaacgccacgctcgccaactcttgtcgactttgtacatatcgacaccccctgtatatagtggtgtcaacttgtgtcgacgtatcatattcatattcctcgcgcgtctatatagcccctggcccctattgtgttggccctcttgagcaggtgagaatgcctcgctcccgagccagtgcctcggtttatccttctaacttagaagtatagcactgtctattgctttaaccggtaagccctgggttttcatgtcgacacccgggaactgccggattgcaaagcaagccagtaattgatgcttcgtctccctatgcatcagtttgattcaccgcatgactgtgccgttgcaccaagcccaatcgttcggacttatcgacctgatcccccctcgaaacgcaggatccccaacatgacgtccacaaagactgggccagcacctaagcctctagtcattcctaggcctcaaggtggtagtgctccacgacctgaagcccgatcagcaggcacggctgaaagagccggtagaaatgaaagcctagtggacatggttcgattcttccaggctcaaaatataccctcccagcccccggctccatcccaacctcaaccccgctctcgcgctccttctgaacctcaaccctccagtccttccgatacaaccactgcactcccggttcctgtttcgcctaaagaatcaaagccagagtcaaagctagatccaaagcaggacctgaaaccatttcatcgtcgccttttgcagtttgcccagcgccaaaagaaggaatcatcacccaggtcaaagcaagaagaacaagagcgtcaaatcgaagcactgagaagggaaggatatcttatgccagcggctttaccaaaggagtcaaagggacaaaaggaagcaaagcgatcaaaagaaagcctgtcgctatctatctctcgatctctttccaaatcaaagaaggacgtggagaacattggacagccatggctgcaagccaaagtcgatggcaacaggcgccctactgaaaccagacgtagcttgggctctctggatcttgatgatttcggctcaatggtcgatgtcgcagtctcactcgcttccgatttcgacgattccatgccgccgccatatcagcccaccgatcacccttcctcccaatcctcatcggctactccaatgtcaagttctacagcagaccctggtcctcacaatatcatccggccagcttcttcgttagcctctaccagtcattccaataggaacgcgtcaattgatgagcaaatccaacggtcatctagctctgcagagttgagtatccgtgccgaccctgtctcacgaggcacgatcaatacatccgtgggtgtgaatgtgaccgagccacagcctaaaccgtccattgatagccaaaagcgaactcaatcagaacaatcttctgttcgaaatgtaacacccctgtcgcctaccctgaagctttttcccgatattgcacctcgcaagtctagcaggggcgcatggagaaattcatcaattcctcggtaccaaacgatcgaaaataccacagcatccagctcacgaactccatcttctgacagcgcccccgatgttccagacgagcgaaaaaagtcttcagatggttttatagatgctccagtcagcgaggcagaactaaagtgctctggtgcccttgtaccttatgcgacctcttctgcagcggcactatctatagaaaaagccccaaaggattctgcctcccaagatgagactaaaactcggccactctcgttgtctctgggcacactgaaggcatttcctctcccggcacctacaaagcccctgccattactgcccaaaaccaaatgctctccaagcactccggactccaacactcgctcgaaagcttcaaatattcgagcgattgagtcgcagccactgtctaccaatttgtattctccttcggcaacactaatcgaagaccaggagctcaaatccgctattgatagtccatgtgcccttgactcggaccctacaaactctcttggcagcgtcgatgccggggagtcaatggccgatgatgaggacagcttgtttaccacttcgctttcggaacactaccagccaaccccggaacattgcattccgagaggacgtgtttcaagtgtgcgcatccctaggatgcaagaacttcccgaaagtccctcgagtgaatgtggtgcaaaggtctcagaaggacagcctctggccgactctcctgtcctaggacacccaacccctacaaaatctaatggcaaacgtgctgttttgaaggggcttcatgtcaattcccaagccagtcgaaaaaatcttccattcggtctaccatcaccgccacccacttcatcactcccatcagctccacctactcagcacccacctcctccgccttctgagcaaaaggttgaccaacgcaactacactgcgcctaatgtggctgttctgccgtcaatgaggaagatggaggtgcatccttcatcggggccctaccgaggctcgaccttatcccggagcgacagctcagggagtagccttcgacatgagaggttccccgaaacatatcaacaaagtcgccccgaatctcgcaccgaatccccgcttccatcatcagacgatgaggtttttggtccagggatagacggcaaatgctcgcgccggaaagccgacaaataccaacgcatccaaccaacacgccgaggatatgagacaatggatccacgacagatgtcctcacgcagtcgccttcgtgactccaatcctgcgcgccctatgacaccccaaagccgcagcacccatggtcttgggaagacttcgtctcctcagtcacaatattcgcaatcaacccacagatcgagggagtctcaaagcagtcaccacacccgcgctgctcctcaagtggatcactacctcgaggaccgggttgcgaatctggaacgccagaaccatattttacaggccgctcttatggcggcgctcaacgctggagtcaagaaccctctcgagggtctcaatctagacgcgcacatgtcatcaggctccgcacacgcacaccaatatcccggccgccatacatcacggcctgacagctgggtcagttcttcccgcagcagtgagtacagcgggtttgagacttctagctcctaccgagatggccggccaaacgtcaaacagctggacaacatgatcgaagacatcgagtctggctggctgtcggacaagtctagtctcagtggagctcgaattgcccgcaaacgatagataatgatctctttttttgctttccttatatttcttttttacatctttactgcttctgacaccacggtgtcgctcatttattggcttgtgatgatctttttggcttccacttctatatatccaggccctctctatctttgcctatatttttcatgataccattttgttttgctattgatctttttgcattcctattattactgaatgacctatatacttaggccgagttgacatagtacaccgtataaaacgcgcacagaattgaaactacctagaaggtcttgaataatagaggagctattaagtcaaatcctgtcgttttatcagtacccaaagagcttagaggtctttaccggaggattcgatctattcattggatgttttgtgcccatcctaatgcttagtcatttgttttggagaccaagtaactaactaactaacttcttgaactccaagtgcttcaatcattctggccgaagaaaagcacgtggcgaaaacagcaattgcaaagatatgaggtgctcagtgctcgtctaactcacccccgaccataaccctcacaccgtataccaacactcttcacattcccccgcggaaccccccaaacatggcgaactcaggacaagtaaatgcaacctctcctccaaatggacccaaatattctaacaagcctccaaagcgcacacagcaggtcccccagcatgtttccgcgctgctctcgcacctcacctcgcgccccggcgtgcaatccaccttgattctctcccgaaaagacggatccatcatccaaagcacaggacagttagcacaaatgaccgaagagaacggaggttctcgaaccgcacacatcccctcagccacaaccgatccgactgccctctccgccgctcaacccacagaaccatcccctacctcacccgccgtgtcacagccctaccaaccctcacaagccgagacactagctgcccacatcttcgcgtttgtctccagtgccgaggcactcggtgtgtcactatcgcggcccactcccactgtgcagcgacccagcgacagccattgggatgataactacgactacgggaacgaggcgggcacagcacgcgaggaagaccgggacggcgatgatctcgatcgggatgaggatggagaagtgaagctgctgagaatgcgcacgaagaaacatgagattgtggtcgtgccggatcggaagtacctgctgtgtgtggtacatgatgcctcccccggcggaggacctggggcatcgggctcgcgctcccggtagtggaagtcttgttctttattgcgaatatggctgctcgagtcttccggtttctctttctcgttgtgtttttatgggtcttgtttggtggctttggatttcatacatatacccgatggagacaaaatcttcgcatttaattcaagttttccataccatggctatgtgtaggactgctatacacgggttgtcaagatggaggtgtctattgataaggaacactttgttctattgcttgatggagggatgatatacggcgggcaatgtgggtagatgtttgagcaacctccgttagctccactgtttacccctcccaagctgacaatgatcaatggacagacatccttcgtatcttgcaattcccacgcctaatagtgcatatatcacctagctataacaatcgagtctgacctctgctctcgatatttcagcagctcgctctggcttccctacactgcaataacaacgctgatgagatggccctccgttcttataaacgagacttttgctgattgttaaacgacaggcggaaatcaggttctcgatactctcgttaatctgatcgacactattgtagattttaatctactaacgtggccatagcatccattcttacctgctaagcacaaatgtctggctcagagtcagctataatgtctcccagacttcgactgatacgtacgaaaatgcatgcaaagtagctgctgagctcactaacgccgcgcctgaggaggtatctgcactataatcaatagcgtttacttcccaagaagtataagaactgcccaacttcgggggtgaatgtatggaatcagatcagcattggtatatcaaccactcagctattgtgcaatctctccacggcgattaaattccaatctggcaatgaactagtcctatacaaacttaacaacaaagccaatacctccccgtgggtccatatagcagagaggttgggcttgaccgtaaagtggtgggcgccgaccaaagaattcaatgtgcgatccagctgagtgagggtccctgctctccgataagaccagactcgcggcatgccttcatgcttccaatatcactggcactatcagtaccatccgaaagatcgcagaggttgctcatgttcatcccgcgtgagtgaccataaaacatattgggttctaagcactgatgtgtgtggatggagtggccctggcgccgcatcgtcgggtcgacgtgaaggcgttgagcgtgggtttctacgtaaattgcaacccaagccttgggtgaccggttcattgctgatcctccccccacaaggcattatcctggtacaaggtgtatggaccacactggcgcaactatatacctcatcacgcgttcacgaccagatctagtcactggggcatttcttcaagcccgcatataccctaggcatgaagctgaatctcatatcggctaattatgagcttacacagagtatcccccaggttgtggagtacttttgactccgaccctagcacgacctgggccccgatggccaagcacgaggagcgcaacagattatactggaattcctagcttctaatagccggattcccgttatcggtgaaccttcagccagcaaggagctccgtatgccggttgttagtttcgttgtgcagggagtggacagtccgcgccccgtggatgaagttgagcgtcgatcggccttttggttccgcaatggtcatatgtacagctacagctacagccaccggctactggccgacgtgtgcagattggacaatgtaaaggacggggtggtgccggtcagcatcctgcactataacaccggtgagtggatatcttgataggatttattcgatattaacgaggatagaggccgaagtatgggggctggtgtgttgcgggaggtgcttgttctatactacttgtagatagcttactccgtacatgcgatgtacatcatacctgagctttccggatacattttacatgctatggagatttttcttcgaatttgcctttttttctcccacatcactacagaccgcatattttgccacttagctgccctgtagtggtgatctctatattgtagatagttaaaccttcgagaaacccacacaccttgaagcctaaccgtgaaatatctgctctttgttttcagcctaagttcccaccgtgaggtcatctgagttccaactcccgaggttccccagctccatctggaaggctgcaggcaaccccaaccaatgccgatcgcagtgtcagccaatcagcatagagataatcgtggaataatgggaattatagtggatcacagcctaacagccgcgcgtggattggcccaagtgcgaagacagcgtggcaagcggcttttatgactcagtggaacttcgacagagccttcagaatggatggattccagctgtggttgagtattatgatgaacatctcatgaaccttccccttgatttgttaatatggggtcttttttttcttaaaataagatccatcacgctatgagtggctacacagacataaggtgccactgtatagtcaaaacattccaggtactctgtcatgtttagaatatcaagattagcatgataatagatatagaacatgagatagaagatattagactatctaatagcatataagaagaaaagtgacagcagcgtgagtcaccgtcgtaccactccagggcttctcctgccctcctatctcggagtctcttcgccgcatccgggttttcccccctctcaccatctctagagaatgttcttcatctcctgattcaagggagaatatcatcaagaagtggaatatttgactatattctatattctgtatacagtcgtggtccctgcgcctcccggcatcttcctaacccgccacccacttcttctcgccacagtgtgactctcttttccccttcctttttgcccccccccgaatctttcttagtcaacttaaaaacagattttgagaagagtcataggtaaggtcgttccatagtgaaatgtcttctcttatttctctgactcctctaacaacatcttgccttccatcagcctcacctcccccgactctcgcctcctcctctgcctagccgcttcaacgactgccttgtacagacaagccaccagcgtggttctgcctgtccacggtccgttgggtgccttgatataaacccttttctatcacacgacttgtttcaaaatgtaccttattgattcatccgttccgatcgcctgtgttgctgttaccgacctccgcatcgtcaccgtctccggctccatctaatacactcggacaaaagagtcatactgccacgtgcccctgctttggttcttatatcagaagcacttggttgatcggatcgtgaatacgttttccttttcttgtcttcatagttgattgtttcctctttggcctctttttaaccgctacacccggcggttccgcttatttttctacgtctggttatcagcctggctctctacttttaaaggtctgccgtcgccttcgtcgcaaagacggcttctgtctcctcggctctcgttcccggtttcctgcttaacggtatcttgacactacggttccaaaaaatcggaccatctcgcttttatccggctgtcttcatttgaacttgtgttcacacaaacgcgctatatgaactccacagtactttcggatatgtcagggatggacgtcttggggttgaacctctcaaacccaagctctcaattgacagcgtctcaccacgctcacccctatgcctcatcgatctcttcctccgcttcctcctcctcctcctctgtattctccctcgattgcgtttcctcgcagagttcgatatcatcgacatctaccaacccggttgacgtgatttgggagaatgagagtaatagccagttggcgggaagaaatccgaacggggcatgcccccgggcttttgccaaggggcctgcttctaaggtggacggtgtagtgccatccgagctgcgaacgcaccctcggcgcactaacagttattcttctagcgctcccagtgcgcgccctccgccatgtctgttacggcagtcggaacggaaggtgaacttcgtcgacaacctcgtcggtaagtcttgaaaaagagaatcctcaagtacgtcctcgtacacccggctaaataatattcccgcttctttaagacaccgcgtcacagatcgttgagaccatctggcccctttctgccgcggcatcccgcagtgacgccgcgaccggatccaaaggggttcttcccctccgcacttttatccaggaaactctccgccgctcgcgtactagctacagtaccttgcaggtggccttgtactatttgatcaaaataaagcctcacgtgcccacgcatgacttcaccaaggagcagcctcgggatcagtcgcctttgcgggcgatgcagtgtggacgacggatgttcctggcagcgctgattctcgcttcgaagtatttgcaggatcgcaactactccgctcgtgcctggagcaagatttctggactcaacactctcgagattaaccagaacgagcttatgttcctcaaggctgtcggatggcgcctacacatcgatgaagcaatgtttcagcgctggactgatttggtcttgaagctgacccctggtgccggtggacccccggttgctaaaggtcagtgctggcagactgtcctacccagactcacacctgaactggactatgtagagtcagagccattgagcccggttgcggcgattagtgggatggatcttggtctgtcggaatactcacctcgcagtctgccaatcaatgaatccgtgcgctctttgtcgcgcgaacaaaccccgacttacgcccggagtcttccgcgaacattggagcccactccgcgcatggattttgccaacttggctttgcctagtattccccggcctatgatgcttcctacgccacagatgaccccgcaatctcaagtgtcctccactcctgctgcgagtgtgggtgcttataatgcccgcccatccatttgtacggctatgtctcaggcgcagaatgcgtgcatggcgcgatcaacactcgatcagcgcccgcccctgtcattctgccctcggactcaatcgtacgatggctatccggctgcggctcgtcggtcgtctttggctcgctcgacatcttcggtctcatcacctgactcgatggtttcggacgtctctaccctgtcatcccgctcttcgcggtcgtcatcagtttcgtccaatgcctccggtgcttctggctcggcgccacctcgtctggccgtcaaggccacattgcgctgcactagtaattcccttaaggagtcccgcaagactctggccattgcctctcctattgacgagagttgtttggttggcgtctacagctctcctggatatcccagttccatgggttcttccgtcccagacctgtctactttttccctggattccagcctgagtgaagctgctcagagtctctgcgagctttccggcgccacacccgaacggcgtcagtgccgaaaacgcggacgtactggatccgacgatctcttgcttcagaaccatgtgcgccacctaatcaatctcggtgtatctggagaccactgcgggttgcctgacggacagttcccatgttcgttcatgacacaacatgggtcttccgctgtccccgcgcagataggcccagtctctggaccagcaggcatgaaacgtgcctgctgtggtagcgaagcacgcaagatcgcgttgaacccgagtctccgtgttgcggagtacctgaattgacttgcgatttattagcggatttccttttttttcttatttcctttgtgcgaggcaaaaaaagaaaaagtccgtcgttttgtttttgtttttttccccctacgacgacctgaccccgttgtacatacccctattctcgggtactcggtcgtacgtactgggacttgggcgtttgattcccacgaagtgtaggatgtggtgatgactggcgtgtcttctacttgcatcgtgcatctgctctttcactttttcccctttcttttatctacttttgcggttgcgaacggagtggtcggcatgggacggttatggtctttatttaccctggttactttgggaggaagcgggcgtctgccctggttacacctgtatcaacttatctatctaaggggtggtatatttgccatcccagagggcgagaactcctcggataggatagtcaatccaaatacagctcaacagcgataccggcccctctcgtatcactaagctccctggcaaccttagaactgcccagatgtgcacatgacagtctgactgtgcaacctcggaacggcctcggggaattccatggttttattgtgagtcatcaaggcgtcaatggacctgtgtggggctgtgaaccttgggtgtggctgtggggtattcccggagggggatattagccggtctcgatgttgtacatggaagtatctagtggagctcatgcatgccacatattgttcacagctcggctcttacaaggagttatgtacttttatttcgatcctggggtgcttgagcatatgcagacaaaaatcccatgtctatccgcaactgattataatagggcgggactaacaaggtctcctgagaaacgagtgcaaatgcttagaagtctggtgtgacaatccttggcttctatcgggtggactcgctgtttacgatggcgagaaaagaaacccatctctccgtatgacatacatactacggagtagttgacgctaacagaaaattaaggatatcgatgccagagcctatctagatgtggaaacatgtatactagtagataaactttgtatcctatattatcttaaaccgcttgttattcttcacgagattgggcatcgaaatggatctaacgaggaagatatggagtctgatttcgggaagaggacatgaatcttggccccgaaggcaaagactatgacgaacaatgggggttagataccttcaatttcgtaaagccagagtgacgacctatcaacgcggttaatcaatcctcaccgcactctgaggatggagttaagcagatgaacttgttgaagttggagagcttactagatagttagtacactacctaaatacatgtagttgctgggctctcttgagttgcgactggatgacagaagctttgtacggcaatttcgtaactagttgatattgatagctaatcatccaccgatgtcgtattaggcaaaaatagccagctataccttggcctggagactattgaagagaaaaatccgaggtggcaccactggcggttagagaatgccgtagcaggtgactcgatcagataagattgctatcagctgatgcccccgcacttacccgtttcgttctgctctcttcttccttgcacccttgaatatataagagctcctttgatgccaacttgtctatctcattagccgtcataatggtctctcatttggcctccatcctcactggcgctcttgcgctgcttttacccctcacggctcacggctttgttgtcccacttccagacaatctccaagcctttctcggacgactagatacttcgacacccagcccgaacattaaccatattgaagatgaaagtgccttgaatcgaccgtcatggttcacttcgactctgatggctcgtcggctgcttgcgctgtcaccctctggcgtcatctccaccaacttcccagagtccctcccaccctccgcacatgccccatcagatgttgccggtctgtctatcggactacgcgagtacattgccgattgtgatggatccctgccatcggatttctctcacgatgatcgcggtgatccaacaattcttggccttcgcattggaaccacttttaagaacattgcagcgggatctaatctcagtctccagttagactggtgggatcatctaaatgaggccggtccagtctaccctggtcttcctctaagcccggctgctcttccccgtgtcaccctcttcggttacttggagaaccttccatccccgcttcccgatgacgcagctgcggccctcgagaagtgtttcctcgagcctcatcccgatgcgaaggtctggctacctggtgcttcttattcgccacatgcgagtttctgggcccggttggtggtcacccatgcttactggattggtggatttggcgatgtacagcagattgggtggatcaacctcacggagtggcaaggggtccgaccacacggcagtgtagagggcgttggtgatggaagagggtggcaggatgtccggttgccgggtgagaaacagtaaatggagtacctaggtacttgcatgaagattgacgaatgactggggcgcgcagtgacgatcgcattagttctttcgcattagacctgcgcatgcatcatggatcgcaattaagcgtatctctatatctctccacgctaaccagttttacgaggtacttttgagttctctcttctcattcgtcccctagtcttatctacataccgtaggcttatcattcttatcttcatccctgttgtgcacggggcaagtcgggggcaaatctggggaataagaagacgttgagacctgcatcatttttggtctcattgtattacttctatatcattgagctgtttgtcgccttgtgttgtggtgttaggttaattaatatacggatcggggcccgaaccctccttatcttgagaacaaccatctcgccaattgcatcttcgaacatgaaactacgcatctccaggccccatttacgggtctcgcagggtgaatctgcatttgcagcgggaaatgcacggtggacaaaccgtgatctcgacccgattaccagaattggacgcaaatggggtatcctcagtataataggtacggtactcgtgcttatcttttacaaccatcaggctggggctaatagaatatgatatcagcatattgggtctccgatgccttgcatgcagcaacctggcagttcgccagcggtatgattgccgtcggcctcacctaccgtgaagctctgggcatcgtcgccctgtccttcttcatcatgtcgttggtcatcgcagcgaacggtactgtgggcgctatataccatgtcccattccctgtgattgctcgtgctagttggggcttttggggctcatatatcgccattatttcacgagtcatccttgctctcttctggtttgctatccaaaatgtcaacggcggaaatgccgtcagtgtcatgattggagcaatttggccaagcttcttgaatcttccaaatgatattcccgagtcacaaggaatcacgaccggcggtatggtcgggtttgtgatcttctggttgatccagattcccttcctctgcatgcatccaaacaagctgcgctggttatttacaatcaaatctattctggttcccatcgcctggattgctatcttgatatgggcgtttgtcaccgtaaaaggtggtggtgccgtatttgaaaagcaggctccaaccgtctccggctccaagtatagctggctgttcttggccaatatgacctcagtcttgggaaactacgcaacactctccgttaacatggtatggatgctgtcttactaccaactttcacaaaagctaaccgttcccagtctgacttcacccgctactcccgcgtcagtccccgctggcagctgctctatatccctatgctgcctgttatattcactttcttttcctttattggcatcgcttcttcatccgctggccaagttcactataatctctcgtctatcccatgggatccaacagtcctgatcagctattggcccaatcgcgcgtgtcgatttttcggcgcagcgtccttcgcactagcctccctaggagtgaacatctcggccaattctctttcggccgctaacgatttcaccgcactagcaccgcgatatatcaacattcggcgcggtcagcttctttgcgccttgctgtcgtggtgtcttgttccctggaaaattctcgaatcggcaggcaacttccttgattttatgtctgcatatgcgatattccttggtcctattgcttcaatcatgatgtttgactactgggttgtcaaccgccgtcgatatgactgtcttgctctataccaaccccataacccaagatatcgctatgagttctccatcccgggcttctcgggtaagagtatatctggtacaaactggcgtgccgtggtgtcttttattgtgggtgttgcgccatgtcttcccggactgatcaacaccgtgaactctcatattgatgtcggcgtcggtatacatccgttcgagtttgggtggctcttgggctttgttgcgacatctattacctatgtgtctttatcatggctgtttcctgcgcgagagactcagatcgaccgtgctgttttacctgacgagatatacgatagaggcacggtgttcgaaggaatggaagcagatgacccagataggaagtatgtggttcctgatacacaggagaaacacatggatgtggtttaggctgtctggggtttctctgataatcatgtgaattttatattctgtaccaagtggcatgtagatatctttgtgaatataatcaacttcaagaatatgccgaccgcttacctttgtccttaataaagtaggatacttgagcaggataaccattcatttggcccaagatgatataaccactatgttttaatttgatgacactatgcatatgttcccagagtgacagccatttttatagcatcttttcaggttctaaatccggcccttttcccttgctgcaattactaatacagcggcgaatgacacgaacccccattttgcttgacccgatctaggtcgagagggttgcatcgccattttagagattagtccaatacaccatgtcggcctattgaattggggaatggaaaagccaacaagctttccaatccgatggtttccttctcaaatgctataacaccaagatacatgtagagaaatggcattgaaaaaacaccagtccttcggcaatctgtcgtcaattccttggcaatctccagttgaccttccaaggtttattctgccttccggtatcttgtccactctcatgtgatatcacacatcttttaagtggtaatgcccctccagactagcaggtggcagacacgttgctacggtggttcggagcatcttatatcctgtatctagatggaggtaactaggtagatcatatcgtccttgaagataaaggtcataagcggccgataatgtatgccttggaaatattaggatctgaatgtattttcgtagatgccaaagaggtatctacctggccatataccaacgcccccccccccnnnnnnnnnnnnnnnnnnnnnnnnnnnnnnnnnnnnnnnnnnnnnnnnnnnnnnnnnnnnnnnnnnnnnnnnnnnnnnnnnnnnnnnnnnnnnnnnnnnnnnnnnnnnnnnnnnnnnnnnnnnnnnnnnnnnnnnnnnnnnnnnnnnnnnnnnnnnnnnnnnnnnnnnnnnnnnnnnnnnnnnnnnnnnnnnnnnnnnnnnnnnnnnnnnnnnnnnnnnnnnnnnnnnnnnnnnnnnnnnnnnnnnnnnnnnnnnnncccccccccccccccccccggaagcatttgataacatggtgaagtggtgagaaggcccgaatgtgggtaacgttggaaagacgcaggaagatacaaatcaagacgatattcatcattgatattagagtattggttgaactaggtgacaggcatatgacatagcgtcatgcggatgctcacaggtacatcgggattggccttgcggcgcttacttgcgttttggcttgggccggatgaaagggtctgtcgccttctttttgcgcattattggaggtcggggcttgggagcagcttggttgggaacctatattgataagaaatcggtgtcagtaatcaataacaaagtcagacaagaacatgacgcttacatctgctccagatcgcattggtggagcccttgtcgggtcattttcggtcggatacgcctggccatcgcgagaaggcttgatgagaccctaaggagttgtcagcatgtatgaaagctagttgttgaaatagcgagaaaaacttactcctggtgagccattggctagcgggcccttgtaaccattttgagtattggccactaggttgtcgcgagggggaccagaaagacccgggtgaccactgactcttgggacattcgaaccacgggcagccgggccagatagaccgggatgattactacccaatgaaccctttgaaacatggattgggggatgtggctgcccggtacgaggacgttgcgcttgtggtccattagaggaagattcttcacgttttctcttcgcagaattatcaagagtgttgattggcgcggttgaatttgtggctcgaacaacaggaattttggggttgtgtcctcctagttgacgttctcgctgacgctcggtcgatgaatcttgacgttgcttgaggatatattcgtccctctccaggcgagatttctcgatctttgaaagaactttcgtggacgtgcagttgcgggatgagtgcccacattcaccgcattcaacgcatcgttcggcacggcaggaaatcttagtgtggccaggctgaccgcagcggaaacaggttcctcgagcatttgcctttgcttcgtcattgtcgcagttgtaagtaaaatggttggcgcttccacagatcccacacattttcgtcgggtctaagcccttggctcccccagaaggtccatcgggttgtggaattggggatgtaccgtggccagaggcagacactgagacggaggccgacgaaggtcgggaaattggcggtacagggggctcatagtcgggagagcctggagcttctgctgtgtcaaggtcgaccatttcaatctctttgtagccagtgaattgcggcttctccaggattttcacaatatcaccctccgtgtagacatttcgctcccgcgcgttctgaatgagccgactccagaactgaccctgttctagggactgcgagttacccagaacccagagcgatgacttggcacgggtgagaccgacgttcatacggcggatatcagccaagaaaccaatacccttgttggatgctcgcacacaggagaagataatgatttcactttctctaccttggaaagcgtcagtcgtattgaaatcgaccttcttcaaaatgtcttcgccgtatcgttgggtaaattggttcttgagctctcttagttggcccttataaggtgtgatgatgccaatcttgcccgcaaagtcgtattctttgacatctgtgatcaaacgatcatacagttgcatggccacttgtaactccgcgtaattgatcaaggaatgacccctggccgcagatgagtgcatgccctggacatcaaaaaatcggtaaggactgagaagctcgctttgatgccagggacgctggcgaagcttggccatgtccggtccatcctgcaacttgccatcatagaacgtcacactggggaaatgactgatggctgggtgcatacggtactggatatccagcaaatgcacgtctcgagggtgattcttctgcatgcggacgaacaagctctgttcatactggaacttggacgccatttttgacagtacagttggaggcaactgtttgggatcaccgacaagaacacacttcgagcagccgtacttcagcgggataagagcactgagttcaatacactgcgccgcctcatcgatgatgacggtctcaaactcgacattcataccctggaaaatttcatgtccagatccactgagagtagtgcaaatgacatgagcttcgttgatgatttgttcttggatccgccgtttatgcatatcagcattgcgggccagcgtatggttctggtcacgggccttatcaatagacgtgcttaattgggaccgtttctttttcatcaagtgaaattcgcgctccagctcttccggaggaggtaatccctttgctcgtgcctcatcgaggcggccacgaagctctttgaatgacgtatcagtcgtcttatgctcttcatagagcttctgcaagtcgacaccatttcctttgctaggatcctgattcagacgggcattgaccatctcatcaagggtaacatctaacacattggtgttgattgcgtcacttcttcctaaacgaagaacagagaccttttcttgccgaccatgagtcgtcctcacaccatccttcaatcgcatgactaactcgtcgacggcggcattgctaggcgcgcaaaggagaagtttctttgagagggagtttctcgcaacaggggcaccgttgactttgatcacctgtttcccaagcacgtcgcttagaagacttccgacaagcgcgatgattgttttggtttttcccgaaccaggaggaccttggatgagagtaaaagcgtcgttgtcgacagctgacttgatggcttttgcctgagcacgattgatggagtaattatccatgatgggttgcagtcttgcgtccgaataagtgagaagaggtgaaggcttagccaagacaatctcttcacacagatcatagtactgcaacgccattagggcaccatattcacgctccactgggatcaaagaagtgatcttggcaccccatgcctcggttcccggccctaaagaagacaggaacttgttactcccaggattgacccgatatgtgacctccatctttttgttctttcgattgacaccgcatacacgagcgagaacatggggcgcactcgggtcgcttgtgagtttgggcgagctggagaacatgaccaaatcaccttcgcccatgctaaaatccttgggaagaacaccaagcggctgggtgctgaattcgatccacgagtcgacagccaatcgggtcatgactttgacttcgaagggtcggaaagaaccttcgtccttcgcctgttgaaaaccttgccacgcttcaagaattaacaaaggttcgaatgtactctggtaggcatcgggtgtgcggaacgtgtttgagaccagggaataatcagtgcgatccgaggaaggaggaagatcgccggttgcgaaaaagtcccaggagaggattgaacggtgaagagaactcagatctggagccaggcgagcccgcatgtccctgacagaccgatggcgcttgacctttctgatgggttgctgttgaagggattgttttttgctcaattcgtaggccgcgacggcgtcgggtttcttcggtttggcaccaaagagttccttgtctaattcatcttcgctctcagaatcagactcgtcaccagaggaaaccatcatgctatctgcaggggttgtatgatctttacccttgataccaatacctttcaggccagagccttgttcagctgtttgctccccaacaccatatgcggtcgtgttcttcttgagtctggcgagctcaatctgatcacgcttcttcttggcctccctttcccgttcgcgcttctcacggaaagataggacgtgggtggggtcattgttagatcgtagaggaggaactgacttgggaaacatcctcggagggaaaatgtccggacgattcttgagagccgttgaggagtgcattttggtggccttttcagctgcgcgtttggcttgggttgcgaggcgagccttgttgaattcgacagaagaagacagctcaagaagagtttggtcgttcaaagtatcatcatcaaagtcatcgtcactggtgatgcgagaggaggggctggaagcagagggtttggcaaaagcggtgatcgaagactgtttcttgagagcagcagttgaggcagtgacgacaggtttcttatagtaagcctccaatgagcggactaattctgccttctcacgttggttgagtattgttttgattgtgccattgacagccaccccctcaataaagctcaatgcatctggcttcacagtggtcacattcatcccacccaatctgcgtagaagttttgccaccaaccctacgagcgtcgttgccaagaactcatccttcaacctaagccattttaccatagcactcattgtggctgttggggacttgaggaaattttcggatgcagaagtctgccccgggtccgcattccctacagctcccaagaacacaccatattgatcaaaaagaaggtcagcgaactgaatcgtgtcacggcaaaattcgagcatgacagccttatcattcccccgaagatgccatgcctcggtctcatcaaagatcgtggtcagtgccagccacagatactcccaaagcttctgcagcgacacaacctcccggcgatcagcgagattacgagttcgcagcataccggtttgactgtcacataatatctctacgatgtctgtaccagtgtatagcattcttggggcgggtgcaaaagtcttcatgtgagatatccgacggaatgaccaactgagtccgtaaattgtggtcgtgaacgaagattggaggaggtgagaaatggcatctcgtcgagctgactggccactgacggccttgatcaagtcaaccgcagctgtataggtgtcatagtcggcggcaaacagagccgaaataacggcgctactagtatcctggctttggaacaacgtttcaaggtgctcgggtggaaagtccgcgagacgctcgatgattcgacatgagaggttggtgagatggccataaatcatattgaagtgggtcttctccttgttcccttctcctttcgtgggaaacatctccaagccaaccaggggcaagattcctaagagggccgaacttgacagcggcaggttatcccggtggaggtgcttgatcacagcatcccagatgggtgcagagtaggtagatactccatgtgagagcgtaccgtgcttcagaagtgcctcatagtcggtcttcaacgattgacactccaatgccaaagtgttgcgtacaacttccatgcactgcgtgagaatgccattctgccgacttcgctcaacatcaaaggtcggggggctgatgattgcgtcgattgtatcaccaaccactcccattgtctctgccaatacgatccgagttactgtaccccgggaagactcattttctgtgaagcggcgtagtgtttgaaggagactggccaaaccaatgtcaaagcagtgatagcgcgacagattgggatattgagtatcttgaagacggccaagtaattgcaatatcaagaaccgacaggcagacggctggtgagcacccttcagtgagccgaggaagggattgatccaggagagcatgtctttcaaagcggatttctcaaagggctcaccctcagaggtttccaggagaaaagcattgaattgtgtgttgtaaaatgcctgttccatgattgcttggggagagatggtttgcatagcatcccagaaatcaaccggggctttctcgaggaatagttggatggtgttgagaaggaatcgcaagctcggcgcaggtatggcgagatgatccacggagagacgacaagggtctatttccaaccctcgaagctgatgtgtaatctgctctttgtccagctttcggacaacaagctgcatacctcgccacaacctctgaatgactgcgaattgaggtggctgctgtgacgcagcccgcaggcccatcagcaagccatcgcgtactgcccaatcaaattcttgattagtaggaggccgcgagtatcttgtccatgactgaacagcccagaagcttcggaattgattagaatcaaaaagaaagcgagagactgcaggaatataatctgaaactttcaagcttcgctttgtttgaatgagtttgaatggctcatcaaaatattcctgcaaaaggctttcgttgcgcagcatggcttcacagctcagggtctcgaagattgacagcaatgcagccctgtccaagacatccaagctaattttctccaatgggatttgtttcaactgggtcgtggcggttgtcaagttacgagtgattctccgaatgtcccactcatcgattctctgggcaaacgcctcaatatcatcttcgtgatagttctcctccttgagcaggtccatgagccagattttgccgatgtaataatgcttgatgcatagatcacatttctccagagattcgtctagttttcccaggatccagttctgatcgtcttccacgccatccttatggtatgccaggatgcgcatggacgagagaaaactctctcttcgagccgttgcttcagctacgatatccttgacggcctttcctgattcgtccacttgctctaaatcttcgtagcgtccatgatcatcgttgtctttccggggacagaagaggtgggtggtctccgggagggccttgagttctctgtacaagacacaatctggttagttccagctcgtttgcttgggaaggttttctggggcctacctaatcgcagccagaaactccatggcaattgtagtctcgaattgtgaggtagttatatcgaaatgacagagttcggtgcatttccttcatcccatgggcagagcagttagaacatcgttttgtcgagaagtaacactgatctaaaagtgattccacgacctttgactcaactgccgatgagataatcaaatgacgtgtcaggaggctcaagtgaaggacaaagtgatgttgatagcagcgaggagtggcctcgcaaccgagtgccgtatttgaccacgatatgctgatacttcggcgatggaaaggcggcggtggatcggcgataatatttaaaacaccttctgcctcaaataatgagactttatgtttagccaaagcaaacgagaaggagaagatagcgaacaaaaatccccagtgcaaatgccggatgccgaagtatcattggcagattatttgggcggtgagattgatttcaacgcgtagacgcgctctattttacccaactaggacactactataatcaagactgcgacgtagcgcaaatttccctcggcagctacacctggaaaacacataacagtgcaggtaggaatcttaaattgccacattaagtaatttccgcgctgggggcattgaatagaatacatgaatgagaaccctatgccggctttgtccttttgatagaggaaagaaacaaaacaaatgaacaagaaccaaacgcaaaaagatcatccaacaagatataacatccagatgggaaccagacaccaggaaaccttcaaacgcgggtgtcatgcactttgcagagacagaaacgcttttgtacaagggataaataccataggccagacaggcttagtgagtgtagggcatgcatcggaaaaaataaaaataaaacattggagacagggtaagagtgagggaggtaaaaacgaagatcgcccccagcatccgactgagtaaacgaccaaaccagaacgcctgctttctatcagggaatataaaaggctctcaaaaataaaataaaacaccacagcatattgctcgtcaaataggaatggcgaggagaaatcacaaggaacgaaccagaagctctgatggggtaaagtcatcagtgacggttcatgaggctcaatgcaacgcaatatgcgctcctctatatcacattatgtacaggaggatcgtcagcagtccggaatgggtcctcatgttgacggtgtggagtttgcgaagattccacccgagaaagcatggcagcggaagtgaagtcgttgctttgctcgaagctcggtcgactccggtcaaacgaatgccgtgtccggtcgggagatcggcgaacatagtccacggactgtggtcgcggatcatggtcaagactggcggtgtagttggtcccattactgctgttttgactgcgggggttgtgggtgtttgcggtcggggccacggatgcagcatagaagggccgctcttcatcagtgtcctgcttgatggcgggctgcactggcttcactatttccgaagaggtagccgattcatcactgggagccacggccttcgggcctccctctttcgggggcattgggggatcttctatggcgtccagatacttgaatttgcccatagtcacttgctcgcggatgatatcgacatcaagcgggaagaacaccttctggatggagttgtacgtgaaacgcggaagcaagcaaaccacgacagtcatcaggaggacgacccagtaactcaacgagccgtaaacttcagcagcggaatggtagaattgaccagaggaagtgaaggaggtataaatgccggtccacacaaagatgagaatgctactgatggcgttgatcagagacgtgaaccaatcccatcggtaagtattcatcataatgtagatattactagcaatcaccgcacaggacgcgactagaactccgatacgggctcggtcattgatattgcgtccagtttcgttgacgaagtttgctggcgcgaataggaggtaaggcatgaagaaacaaataattgactggtacatgccatcggccatgtacaacctgtccaagttagtatgtctcgaaacatctcaagagtttgggggaggattcaaagtaccagaacttaagttgcgaccattccttacgctcgatacctctcatgtacagttgagggacagcaagagacaccttgtcgtccacatcctgatcgaagatacccatgaagattacaggcaatgaagtgaaagcgaggttgaccaagataatgtaggtatagtcgaagaggtaggagcaatcgaagtcgttgtagatacagtaccagaaaagggcgaacgtccacacgagattctgggaggagtcagtggtaatacagaataatagtcaataccaacgccacataccttataaaagaagttggccgtgcactctccgaggcgacggtaagaccatctcccatgcaccaaaagaaggcgctggaggtaccggaactgaccaattgcataatcggatgacatgacagcttgtctaccttcttcgccagcaataccgacaccaacgtcggcctcttgaatcatagccacatcgttggcaccatcaccaacggaaagagccatgatgttcagcccgttcttgaccatgttcacgacggcggctttctgtgcggggctgacacggcagcaaagaacggccttgcactgcttgcagagtaggaggaatttttgctttaagtcatcggagagcatcagcttcagggtttcaccatcaacgaccacggcatgtgtagcctcgggtggtgtatgatcagcacgagcagcaataagttcctcgtcagaaccggtcaatccgaaattttgcaaattcttgtcgagttcgtcagaggcctgctggtgttcagtctcgggaatgttcagcacaatcagctccatgttgttattgagtaggttgcaagaaaacccaatgttgatggcggtctcaaccttgtcaccggtaagaacccagagtttgataccagcgtccgcaagaagctggattgtatcgggcacaccatcctgaagtctgtcctcaatggcagttccaccaataagcatgagctcctgttcgatttgactagaaaccatctctagtttctcctcacggtctgtgatcgcagcggcagcgatatcgtgttccttagcccatgtgtagtattcatcctcactaagcagtcgatcggcaacgcacaaagttcgaagtccttccctagcgaactcctccaagtgctctgcagtctgtcggcggagctcctgttgtttgccacgggctagacgggagtaaattatactgtccgcacccttgcagaagaggcgtatagtaccatcgggcattcggataattgcactcattcgttttctagatgagttgaattcaagggtgttcaaaactgtatatgtgcgttcctcgcccatgacattcaggagaagatcgtcaccggctcggcccaaaacggtgaatccacaatctcgagcagtgctgaccaacgctgcctcgtcaggagactgggccttaaactcaatttgaggggggtcgccgggagtatgctcggtgataacggtatgacacaaggcaagagccagcatgaagtcctctgtacagtgcttctgccgctctccggattgtcctgtcaaatcggccacaaaattcggagcaacgaacgtcagttggtcgtcgtgcaggtaagggttgtcatgaatcccacgcaacagacccaacattttctgcgcatcggcagcaatttgttgtcgagccactgcggcctctgcgtcagcatcagctccctcgcgacgccgcatgccaacctgagcttctgtgtaagcctctccatatgccaaaccgttgaccgtacacttcttgaactccatcagattttgagtcaatgtaccagttttgtcagaaaaaatgtactcgacttggccaacgtcgtctgaaatgttccaagacttagggacacaatagatccccagtctctcgtagtacatgaacagatcgttgttgatgaaaagcgcttggatggtccgaacaatttcaagagaaatataaagcgaaatgggaaccaagttttggaacaggatgagagcggtccaaaaggtgacaataccagtgacaggtggtgtgcctccgtaggactcaagatcaaagtagtctagagatttgtctggcctggcccatgcgattccattcacaatacctgcgacaatacacatgaggaataggatgaaaaagttgtaaatgacgttccaattcagatcctttgccatgcgaggccgttttgccggagtcgcaccggaattgagcatgatcttgctctctccaccggtgaagaggacaacacctaggacccattcggtactcttcaaattgcacccacggagcaagatgttgttgatagagatgggctcaaccatctccttccggggagcttcagggaaacgtggatcgcgctggtcccaacgtatggcaccattgtaagtgtacaggttggcatgtggggcctcactttcgatcacaaactcggccttttcgcagtctctggcgtgtcgaacttcatggccacagtgaagagcttggcgaaccttcaaattggtttctccatccaagccttttgtttcgacataacatgcgccatccgggtcagaagtggacagaatcacgacatcggctggaataggatcctcgttgtacaaccggacaaagtcgccaacttgcagacttttccactgctctcgcttgaatcgggccttgccgggtgtctgcttggacatgtccaggatggttccatgtttcttgtccggcgttggctcaacgacgctctgtcgagctgcgctgttcggagacagatacttgttttcagggttgctcacgatcggccaatcttcgcgagcttcgggctgaggcgatggaacatcggtcatggggatagcgatatcttcgggggctaaggagttccgctgcgtataaatcgaggaccggcgatctgctgtactcaagaatgagtcgcgtctttgcccttcatcatcatccccctctttctctttcttcttaaattgagaaacaacccacttatatgaggcgatcgagcccctggtacaagccttcttgacacgacgccatatatcaatgttgtcttctgtcgaattgacattgttccattcaaccagtctgtaaaccggagagttgttcacttgattgtcagacactgttctcccccaatcctcaatggcatctttgatagcggtcacaacgataataacgattagaggaacggcgttcagaccggggttgttggcgccgaaaattggaaagcactagaatatcatcagccaatgccaactggggtggaagccatggaaataagggtatcactgcgtacattaagaatgatgacgaacaagaaatagatgttcgcgatgttgtgaaattgtagccagatgttgtagggaacaaaggtgagcggtgtatacttggccgtgcgaattttgtttctggggtacgtgatgcgcaaatgaccatcctcgtctcgttcggattccggaataggaatgctgaagtagattctccgattcggtccttcttgcgggatctgagattcgctattgcctgaggtgcttgtattgttcgattttcgcttttcgtctttcagatctgaccgtttatggaagcgatcgataattgaaacacgtttcttgacgccaccatgtccgggcgctcgtgtggtagcccatctttgtcgtttagtcggcttggagacgtggctgttgacctccccgatatcagcaccttgctcgttgttgtccccttcatcctctccattgtctccagggaagcgcgcggaagccatctaggctattggtgcgcccaagaagggcataaaactcgatagaaaccttgattattggtagctggctagcatccggtttgaagggccggaatccgacagcgctcggcgcagagaaagattgtcggtctgagtgcgttcacaggggttgaggacgatggaaacgcaaggtcataggcgatataagtctcgagaaaatcaggggttctatgtgcgcgtgtcgaagatgttgttgtcgaccagtttcgaggaatcgtccaaaactattcaaaacagggtttccgcggctgatcgtgatggaatatgattgcaatgcgacagccgaagggttatagggtgcacccacaaggggccattcaaaatactgaagggaaaaagaaagaaagagaagaagcaccaaagtagttattttgtgcttcgaggggtgggagaaagatagagtagccacctgagcttaccctcgtatggatctcagtacgggagagtatgtaatctcgttaccacccgtccgtgggtgcttaccgatggggccgggccaaccttccaaggaagatacctctgctttgtcattcaaagcgggcttggcaggaggtttttacacgcgtcgactgttctattggtataatttggtatgatatgtcttgcgtctcttttacactgcctctttctcttgttctcggcatctttaggcatcttcattcgtgttggagccagcacgactgcacaatcaccgagactcaaggtaggtagccatgtatatgatctcggactcaagggacaatacatgtaaagtccggtatttataatgtccagccccgttccgacctctccctgctaaatttctgactgtggcaatcggggtactcggcacttgaactatgggacgagatattgatatagttacggagtacatagtattgatatttaatcgctaagagacattggtggattcgtgtttatttcggcctcttttcactagtgcgcatcgcggcactgccaccgtcagcattatgatcgcttacaactaggcttaacgagggattacctaccgcgggtacggagtattctccccagttcttcactatgaaagttgctccgtactccgtacatatccgtttgatccgtatgcaaactctggagtaacggttattattggcccaccgcggttgttttcttcaccccactatgaagtattaatttaacaactggccttttcttgcgttgcaggttttcctagaagttgtagggtacagggtacctcgggacgcatcgatattcttactaaggcgaattttctgtcgtggcagtgtccatgtaatcgatctatatcctatcagaagaatcagacagtattgtgaccatggatttcctttttttttttttttcttcccacgcctcccctaatgatatcagagacccagaattcggggtcggagcatcgatcctgaaaccgacacggcacgagcttcccggtccacctgagtcagcttcccttcactctgatagttatgttttgggttagtatctgccaaattcccaagactgttatgcatatgggtcaaaccatcattggacccgttctctcatttttttatgttaccgtatgcatccctccttgtttcttggcaaaaatagaaaaaagaaaacccttggcttcaggagaatactcctgaacaggctcgatgatcggcgtcctcgtaaaacaagggttcgcggattgcccgggactcgtgttcccctttcctgatagccctaccaaatacccacgtatcacgggtgtgttcctctaaaagcttcgaaaccagatctcgaggcaagggtcttaaagcaaaagcagttgcagtactctgtacagtagtgcaacgtttgaatggcgtgctgatacgacatatgtacatttcagggtcgtcacccggtcgaccacgaactatagtagtgggacccgatgtttagcgtatcgtcgctttagataaagctaattggagtgtcattttccctacccgttactccgtagactgacacagtaaaaatatgtatcagaaagaatcggccatttccatcgcaagtttgatgtcgatcaaacgagatcagtagtaatcgatagtagaccagatcaaccagagatcgccgccactagggatgtggctaccagatctacaatctacaatacgataactaacatacttggtagccaagtatgttttcgacagttcaaggtatgtactcccaatgcacacaggtcagttcaatatcaatttgacctcgatatgagttcaattagtcttaaagtgtgggattggatggttagcgttccgaaggttaaaaatcgccccgtccaggttccacctgagcaacaaggtcaggaacaaagaaagaccgatgagtcagcatctcattgtccacggctgacatcgcgccaaatcggcgcgttcgacgcgatatggctcttgttttttttttaacgagaacactcaacatcactcactcatcatgcagaccataaaagagttatggcttaatagacctacattcgctcatgtcaactcgaacagcacacctgagacgaagagtacacctcagatgaatgaaagcgctgaactcgcgaccgaatcctccgaccccccctcttcctttgcatttgatcaaatattaccacaatctgaacaagatgctgaggcccacctaaatgcggcactgtatctatcaactcaggacaccctccttcagtcccctacattgcatcaaagtttccaaagtatcgactcagttaccggggtctcatctctgaataagagcctcaacggatctcagcgcatcatcaaggatggcagagaggtagtaatcagctcggatggagaagacacagactcgatatgctcgttggaggacccaaagaatcttttcgctccaacgtctaaggacctgttcacaccggccaaattcactcagaggatatcatcgccaaagaaatacaaacacaacattgactctctagttcatgatgcagtggatgataatgaggtcgaagccagcgtagctcgggcgaaagccaattatgtgcagaagcaaccgaacggcatggagcacggaaacggctcgtccggcaccgctctgaatgaaaccatgttgatctctgctcttggcgagaatgaagacggtgttggaggtcaacgtctgataaatgctattagaagaactgatgctcttgaccccggccgcgcctggccattttttgattgcacacagacattgccgtcagccccccaatttccaagtgatctggtcgcacctgggacgagtatggatatattaaggggtgagctttaaatgagtcgttcgctgcttctttccatgctgaccaattgtagaatctgatactcgcgagcgccagttcatgtcaggcgaatttattcagatggctttgtccaaagggcttttgccggacgaattcgttctgtggatgttttgttccagttcgtctcataccatgctttgcttattactgtcaagctaacatgcctttcagtaccctatgaacgccgagaggaattgagcaatgcctattaccgaattattaaggtttgtagatgctcttatatcaaacccccattggtattaactaattgaatatataagaatatggatcaggaccgcctaaagctgctcatccgtccggccgatatcaatgaacttttctcacgactaggtgctcggagccaggctttagatccttccaaggagattatcccaattccttcccaatgtatgatttgactatattgcctgtggctctggatcctgctaataaacactgtcagatattactccagattctgcgttgaaagaccatgcaaccttcgtttcagtcctgagattacttagagaaactgctggcttgtgagtttccactccctcaaacccgcgacaatgtaatgcttacaaaattgtagattcgcagaagacacccaagagcaagtggtgctcctactgctacgtcttactcttgatgtttcgttaacagcggattctacggtatcgtcggagcttcagtggaccataaatgctgtcttggatcctgagaatttccatgaaaccagtgcccaagattcggtaagtaatctcctatatgttgtaccacgttcaaagccaacgataccagttacgtcgagtttgcgccactttccacgccacgatacacgatgtttgcatccaaagtcaagttgtgcatcatatcctacccacatctccatggtttgcactgataagatgtcgcctggccgttgcatttttactacggagtcccggtcctctcaccgaaccccctggagagttgcttgatatcaaacgtattacattgttactgctacgggatgagcgtttccaagttaggcgattcaaaggcatagccgactacgactggagggaattaatttcactcactgctcttctcaacgtcgcgattgattcgtctgcgctagcgttgaatttcagcagtactcaacccgagaaagactatgacgctgccatcgacaggctggcagctcagatcaaaatgatattttgttctattcaggattccggggcctcacatgtgacacggacagtggccaaaagtgaactcgaggccttgcattaccgaattgtctattcggttcggtccaagccaccgccgaaaaccactattttcgagtcacatgtaaaggagagagatggtaacattcggagcattttcagcacttttgctgcgcttgctgctgaaaagcagaatcccgaggccaagcaagaaacgaattcgtttgcggcgccaggcgacgcggataatggtgacaaagatattcccatccgcgcgcatgatcacgtatcctgatcacattggcattggcagtttgagtcccaaaatctccatttcactgaaatgggttgatgatggaatacccgcccagtttttcccgtctgccaccactctgacttacgacccttatgatcatgactttgagccaggcgttttattacagtataccaatgtattcaagcacgtatgtagaatgagagcaatcgctaaaagagttcggtcatattccaaaggagacttgaactgtgcaaagaaatcccctctatttgtgaagatggccaagagagacaaagattatctgaactataacacacgaaacacagcagtcgcaaacgtgaaacccaagacagaacaagtgatacacacttagtcgtagaatttccggttcaagttcttgccaaagagcgtctctcgcactgcaggaagagcatcaatttccagcagccgcagacgctcctcgaaagtgttgttgatctcaatcttgccttgcccaccgacaataaacacaccaccagcactgcgacctagttagtccccttggcgtatattgagagggagagcgaataaactcacgatccttctggcaatggctccgactcgtccaaagtcacggtcacctccgagccaacatggtccttgtactccttggtcgcctcctcaatagcatccttggtaataccgaagtccttctttcgcgagcgaatcgcaacgttatcctcgttcagataatacagaccctcgaggaccagccccttgagcatggcctggtacttcttctgatcgtcggcagccaccttggaaaccttctcacgggcattctggaacaactcatcgagtagctcctgacggccacccagcacgcggagtcgggtcttgttagcgagtgtggaccgggtgatctgctgggacatggctgcctgcttgaacttcttctcgtagagggtatcgatggccgcagtctcctggcgcacgagcttggacttttcgatagcaaactcttcgtcggccttcaactgaatctctcgggccttctcaagtgcttcttgtttgatgaaggcggtcatcttgcggagctcgcccgcgacctggattggatggccatcagtccaactcaagcctcccaatacttagagtaaacggcgaacatacctgatcatctgacagagcatggctttgtgacattttggcggttcactgctgtatcgcctgttggggtggaatgacgtggggaaaagggaaaggatgttgtgtccaactaagctcggattgcgttgccttggcgttccgcacccaggtcctccgcactcccctcgacaacttgccatttcagcgcgatcctatcgttccctataattttacctgagctatggcttctttactccggtagtttcttctacttgatgcgcctttcctatcccttgacccgaccaatgcacgatacacaacatgggcaatctaggtgacttgtcgccggagggaagtgttgcggtaagactacggaaatcaggatatacagcgagataagatccaaagctaattatgtatcaggttggtgtaatcgttggactgatatcaaccagcctccaagctatcgggctcacgctccagcgcaagtcgcatttgctcgaggatgagaagcacccctacgatgtgcgcagacccccctacaagcgccgacgatggcaaataggaatggggatgtttgtcatttccaatattgttggaagtaccatacaaatcactacacttccgttaccagttctctcgacgctccaagcggtcagtagttccccctccatgcatgccggagattggttgctgataggaatgccgaatagtccggactagtgttcaatactatatttgcgaccctcatcctcagtgaaccctttacccgatattctctcgcaggcaccgttctcgtctgcgccggcgcgttgttaattgcgaccttcggggccatcggggaacccgcacataccttggatcagctcctggaccttcttcagcgacggtcgtttcttctgtggatgggtgccactacactcctggttgtcctggtacttgttggtaccaaaatgctgaaactcttcctaccgtcctcacgcgcgaaaccctcggcctctggtcatttttcaccacatctactgcgattgcaaagccgaatgagattgatccgcggcatgagctatggatttgtcagtggtatactgtcggctcactcccttttgctagcaaagtcggccgtggagcttctcgtgcgcacaatggtagacggtgtgaaccagttcaatcgttggcaatcatgggttatcctgctaggaatgatcttcctagcactcacacagctattctatctccataggggcctgaagctgtgtagtactagtgtactatatccttttgtgttctgcatctataacatcattgctatcttggatggcctgatctacttccggcaaatgtcccagctgacgggcttccacgccggtctcatcgctttgggaacaatgattctcctgggtggtgttttgtgcctgtcatggcgacttgaggatatcgacactcataccgctgtcaccactttgggttccacgcaaaccggacttgggccgggtatgggaatcgtggaagagcactctccggcatcacctggtttgctggacggtcaggatgaggaatcacagattagagaatgcgagccacttctcaacccgaaaacccatactcgccatctttcatatcagcggggaagagctccgagcctgccactcaacttgcattttgatcgcgactcagctgatataaaccccgcatctatttgggctgaactcgacgattcggactatgaatctaccgatggacacagacagtcctccatagatcgcctgcgtagcgtcagtggtagtgcaaccctcaacggctcattgcggggtctgacacggcaatcgacgaccggcgctattacacacgatcgcgaaagaggatctcgccgaatccaagaaacatcacgtgaggacccatggcttcgcacctcaggacctcagagtgggttatcggccgtccatcgtaaacgtcggaggggcggggatccgttcacctcatcgtctaaccaagacatcggtgggtacggaaccatccaaggggatggcgatgatactcactggcgcggcgactcccctatcattcgttcgtctgccaggtctggtcttcttaatggctcaaaaagggctctggcaggtgcctggaggtttgggagacaatatctgcctcgatggagtagcccgccggctgggattgacccagaagatggctcttcctcatccctactcccccactctggcgtccctcttccacgaacacactatccacagggaatcccggttcctgaatctgacacctttcggccatcgtcatccccaaccacctctatataatatcaatcttcgctccaacctataacccttgccttcaggacactaccacctcgggcttctctttgcttttcgcctttcaatgcctatgtacagcggtccctcttccttggacataccgcaatccacttatgttgcttccgtcgctcatagctcgcggtcgggaaaagaccattgccggtctctcttttgtgttctgccatccactgtctagataatatgatatgataccacccaatcgatgatatagctccacgcgaatgaatataagaccctgatacaattcccgtgctctatatgataatgcagagattctaagaacaccggtcacaatgtctgccaaaagtcccttggctgtggcactgacctctcatatgcaggtccgcgatcctttctctctacatgcacgccaaggtatatacgtctttcggtttgaacgtagattggccagatttgggacaaagtaccagcccagcagtcatgcagaatatcaaagtaaagtgaatctcattggtatggaaggttgggaatatatctgacaaatcggatcgtattgttcgaactggactgaattactacccgagtgtccagaggccgttttagactacatggtctaacaagtacccagaaagcgagaatatacttcccattacgagattcggtatcctcttaggctgcatatcctagcgggaccgcactacatggttggaacggagcaggacccaagtctaccacagaccactacgaatacaacaagcaacaaaacaaaccaagagaacagaatccgattgctccgtaccatacataatgtaactcagccatgagccatatcggtgcgaagtccgaaccgaacggcgttgagaatccgtcataaccaagacagacggtctcgtcatggcatagaatcaacagaaacaataaacacacacagcttgagattagacaatgaggaaaataacataatcagtggacaaagaaataggttaaaactataagagcaaaaaagaccacagaggaaaagccacttcgccgacgagtttcaatgcaccacgaacacctccatcctccgccattatctaggtagaggggggaaaacaaaagccaaatttgcctgcttgcgctctctttctcttttcttgaagttggtttcttttttttgacggacattttttttgcgtaagttttttttggtattggaaagccatagttctcagcaaattgggggtctcctttttccgagatagaaggcaatatcaaaaggataaaccagatccaatatcatcaaagagagaccggaaggcgattccagcgcggtgcttgacaatttacaaatagtctcacgagagtgccctgtagaatggcgcatgcagatacagtacgaccatttccgagggaagggtgtgatgatggatcggcacagagggagacgggtatcaaatgaacgcgagatcgaggcgcagggaggaaagaacagagagaagaagacgcagcatcggggacctttagcaaaaaggaccccacggatcagatcataattttaagcatttaagcagtgggttggtgctggggcggcatgcgaccgccgaccggcatggggtactgaccaccagcctgctgttgctgctgctggaggttttggtagtacgccatctgctgctgctgctcgttggtcatgtagcctgggtgaatacctgggcgcatattaccctgcggtgcgttgacgttgttgtgagccacatcttcgggggcctcgggggcaacatcgggggcgtcgacaccgttctcactggcggctgggtcgggagcgttgaggcatgcctatcaggatgttaatggatgaaataatatcattgaagtagaccatggcttacctggatgaggttcttgccctcggccttggtgaccagcggctgaagtttgggggtagtgaaggtgtagacaagaccggtttcagagacgaccaggagaagaacttgagtgccagtcaagacagagagttcataggcctatagagtccgatggcgattagttaaaagtcccaatcgatccaagatagaggaaaaagcctcgatcggggaactgatgcggagggggcctcgggacgcgacgcaccttcttcatgatgccggccttccgcttggagaaagtaatgtgccgacgcgacttatcctggataaacttgatctcgatcttgcggcgctcacgaccgggcttgtcatcatcatcatcttcatcatcggcgctcatgcggttgcgcttggtgccacgggcgtcggcgccgttgccgggaaggtcatcgtgaccaggggaaagcttttcatcaagaaccgcagacatattggcaataaagacgaacaaaagcgatttaatatgggggggggtggttatgatttgagggggggataccgaaaggggaaggcaagagatgacccaatcgagtaacgcgtttataggatgtgagagaaagggaatgggggaatcgatgggggggggggagagcgaagaaggcaaagtgcgagttgcgatgggcaggcggtctgttacgtggatcacgtgtacggctggtatgagtacaatctgtacggtcagataggttagagtacttctggtactgatgaagtttctatgagacagaagtaccgcgaggattatgcttgtattgtcttgtaattgagcggtattcgcctcctccaggccagacacgattcttggctctgatcgcttattggctgatttcccttcggcccccccgttttccgttttttgcccttttcccctctggtctggactctttttcctttgttgctgatttcccggacggccctaattttggttatttagcccttttggacttggaatcgacggtaataaatacgaaatattgagaattaagaattaaaagagatatgtttctttcgtactttagtacttcattccatttcacatgccgcgacggggcagaacttctcaaggtccggtgctatgtgattggccttgaaacatgccatatgagcatttctatcaagacgctatggtcctatttcgaggttacatctacaaagtcgaatgagtataaatctgtgctcgcatcacacaagcgcgggtcgcacctactttgtggcacggaataatggccctgtatacagcgtactcgcatagctgcattcagagtacactgtaaatagccccaaagcgcatccatccctgtcaccactctcttatctctcttatagccattctcatcccctttctgattgcaaccacaagaaccgacctcacattcatcagggcaccagagtacggagagtactaggccacggtctcgacacaataatcccaggcatttcagatccccttgcacacacatgcataccttacatagaaactcgtagagcccctagggatactattttggggtctcacggacgtagatttgccaaggtacacaacaatcggggtggcttggtcagtaggccttataataaaagttaggaatccagtcagggtaagtttctgcctcttctattcttactcatgttattactcccacgtcgacggaatacagatgtacaatatctgcaatttcttcgttgatctggtttgatattgctctaagcatcaagtcttgccataacccccacctcgaacctgcccaggtgactaccacgcggccttaccgaatggcaggtttcttggtcatatcgacagcctcgagagcgaaggtcgaccgctgtcgactgttggtcatcctactgaatccatataactagcaacaatatgcaaccagagccgatcaacgggccgatccgaaaagccctagacccgatgcagcggagtctagctcgctcgcttcaaggttacttcctgcataccaaaaaaatacctcgggcaacattggaatgacgaaaactgatcatattcttcacataatgaacaaaggtccaacgctaatcaccaacggagaccccaaaccgggtctgctgtcaagtctatttttacaaaaaggatgcaaggcatagggcacaaaaagtggcttctcccaaaagcgcacttgaggccggaagacatggaggaaataggaaataaggaaagataaaagcaagaccaagccgattaagtgtggtaagcctcggccaaggcccgcatgggcctagggataggaagaccgtaaaggaaagccacataacatttcaaaaattgagatacaccgtcgggatatagagggaacacaaagtcaccaggttcctgcaccgtactggactccgccaatgcaacgccggataaatgaaacagaaactggaggacgcggagggcaagtcacgatcacgagtctcatccggaaagaaaatggctgttgggttggtcgattttgcaatcatattgggctggtgtcgtgaagtcgggaagaacaaaaaaaggaagatgtgtagtatttgagaaaataagaaaaagagcagaatcatgtgcaacgaagtgaagaagtacgaccaacagtcccaaggaccagcctcaagtagtaacggtgcatttttattgctggtaagtgccgcgaagatgatggtcactcacaccaccgccaccaccgcccttgggaccgagccagactatctcaatcacgctgtggccctcatcttcttcgcgaacatagaattggtgcacgttctcaccgacaacgaatgcatcacgaagcaaccaccgatccttagcaacgccatcttcctctgcgggacgcaagggacccaggcggtcttcataaccgcgggggtcttctggccaggtcttttcggtagcatcaaagttgatagcatcatccgccacattctcgccgtacgtatatttcaccagcgagtagccgttggtcataacccagaagtgacggagagtctcaccagtagcgctcacagactcctcctggtcaaagacccagcgacggagaacagatttgcggcctgcagcagcagaaacggtggtcatcttgaccacgtccttgctgtaccaactgttccagtggtgcattgattcgatcttgcggcctgactcgtaaacaccgtccacggggtctgccatgtccatctggtagagcgaaggccacagagtcaggggggtgtcaccgaaccgttggatacactggccaagcttttggtcaccgggctgctcgccccaggactggcactcctcgtagtgcttcatcaggacatccaaaagaggcttcgagacaaacacaccggcaccaccgaatgcaatgtggccgaaagtatccacctgccagctggcctcagacaaagatccaatgtagtgcttcttgctttcatcgaagagcttcaattcctcggcgatagtagggagcgacaggaagaaggtatcgtcgtcactgaacccaacccaggcggtgtgcgggcggtgcttgcgaatgtgctcggtgaacgcctcgaccataccaaagtaacgggcagtgaagtcgagaggagaggccttgagggtcaagtccagaccgcggttgcggaagtaagtctcttgcttctccaggtcgtcgtcagactcagggaccagaacaatcagaccggccttggtgtttccgtatgagtagagcaaagagggtagcaggcggtccaaacggtcgactgtagtggccagaccgaaaagaagcttggaggtttcctcgacatcgtcatcggcggctacatcgacgtcgatgatctcagggcagacaaagttctccggcttgttctcgggagacacgaccataccgcgctccatgacaaccataggcgggagtacaggcttctcgatttcctccaaagtgtggaactcggtgcgagggttcacatgacgaggacggaaataggcgcgagtgtagttcttgcgtgggagccattcggggaagggaaggggggcagccaatttcgggtcagcctcacaggtgttactggcaggctgctgcgaatcagattgtgccgacgtttgtacttgaggttgcttgtttccactgaaggaggcacggtcaatcgggtgcttgaaccgaaggaaggctgagcggtcgtagcgttccatgcaaaagaaaaatattccgatggtcaccagagccaccaacgggaataccgtcttcatccgaaatagaggcattttggctcttccagtattaaatgacgacttttcaaacatgtaaatagaagcaggcgaggcaaaagcgaaatcggggcagatgaaccctgtaattaaaagttatgggttcgggcgtgcgagatgtcgtatcccggaaatatcgtgcagaaaaagctggtagcaaaacgcagtttccacttgagagaagggtcaaagaaacgagtgtctccagagcggattaaagagtggcaggcaaatacagtgccgagatatttcaacgagaggctggcagcgtcgggacctgcgacacggtccaaaggggggaggggcgtttgtaaagggaagtaggaggactggaagagaatagaaaagcaagactaacgcggctggacgatgtgcccagtccgagtgaaaagtcgatgagaggatgtaggattgagtcgtgaagttgttgtaggaggaaagaaaaagggaggccgtcgaagcaattaacggggacaggttggccgtgtatgggtattaccgtaatatattatttagatcttttctttttttcacttcttttttcaatccgttttctacatcgatgtacatgtctacatatctgacgttcgcgccatctgccgtttttcgtttaatatgctgtcttcagtgatatttggttatattggagctggatattgatatcttggtattcatcgcccggttgcggtgtgcccggttgggatgcaggaacagagccctgcgataacatcataaatgatatgtggcttatactttgtttcctttgcttcgttttgccggttggacctaagtgtcgatcacgacggaaaaaagaatgccgttggctgggagggatcatctccctcccagcagcttcagtggaatacgccgccatgaaaccggtgatcagcactggggttttttttgcatatttttcccctgtctcgagcacaacaataatgtttttgtctaacctgggcacagatgtagtccttcaagtcggaaatgggcatattgaccttggcattccagaacaagcatgtttcaagtatcttcaacgttgagcaggctgtttgcggcgaggatgcaagctcgcgcgaaggtgccgatcagctgtttgtggcatcatacataaatttgtacgatagaccagaaactcatctctactaataactccgattgctctctccctagcgtctctacatgtatatgtatgttgcacggaataatgagtacttgtatgtacatatctgcatatagatactactatgtatagatacactatggatccgaattcgtcggcacattgcacctcactgactgcgcctgaccctcaatcatccagcaatggacaatataagcgactacctaggtacgacatccgttcccatcctgagaccccatcatgatgatgtgaatataataaataaccacattgaactagaaatcacgtcaccgttatcaaggtagcgcttggaccatcgaagtaaagtccggagtcttggaaagtgtgctaactacgaactacaatgaccccagtatcaaataacggaaaggacaggtatacacaattgtcatccatattaagaggcaaaaaaagagccagggaaatgatccagagacgatcgccctagcaccccccagccgcgtcaaccagtcaaaattagccggaggggcaaatgaggccgacgccccccacagacacgcgtccttcctgacgacgttacgacttgtgtaccataatgatgggcgctggtacggagtatatatgtgatatctgggtggagtttcagcccgtacctaacctgttattccccctgttatgtattcgtgtcacccagggatgctccgcaattcgcacggtatattttccaatgaaaaaaaggagagaccctgaagcttatcgggtaacgtatttccagtggcgatagtatctcttggtccatggatttcctcacagggtgggccgagatcgacaaccattgaaatggccctggtagtttctattttgatatattgtacgagcggctcctcaaattcctcaatcaccatcacggctgatgacgggcctggttttgtagtctcagcatggatcagcaactcggtcgacatgatcgaatctttgatggccttgcaaggggtgaccgatcgctctgcgataagtattcgtctacagcccagcggtcttgagaccccggggcggatcttcttcctgactgttatttatgcacttcctatgtcggaagatgctgggccttttgttggctcctgcttttcgtggatgatggcaacgtggaccttccagactttcgagttcgctctagattatgacgggactacgacgagcttatctccacgggcgttgcgcgttacatactcttcctagagtttaatcgccaagacttcatctatagttaatttattgatttatccaagttggcggttgctttgattcttactctattgaatcactttaagtaccagctatggaatgccgattggtcatgtatggacaccaacccgggaagaagacattgatttctctggaatcctcataatagtcagaggttaagtctcccttggtagagagccagtgcaagggttctccctgggcgctcaggcctctctccttgggtctgcatgttggtcttaataatctgtactccgtaagttggttatggtgctcgactttgtaccgagtcctttacttatgtacgcgatgctgatagtgggatttctgtagactctgaactatttggtaattacgacaatataataagttagaaaataacagagatgtccaaattcctctctgtcaccattggcataataggacgggtactttgacttctggattttccggtgaaccacttacgaccgaaggcagtctctgggacctggctatacgttgggatatcagatcccgtaggcactggggctggagattgagtcaaagttgccatggtttatacaggatattggaagaagatatataaatagaatatatcacagcgagttggagtaaaaggatcttgttatagagacaataacgtgcattggattgcactatatcagacagataggtgttttattaagatcgcgatatccttggttttgaaacagccgctaatacctacacggtcatgtttgtggattttaagcttgaatggtcgtcttggcattgtggtcacagcggcaaaagggggagatatcgcgctcaagtgtctttctgtcaacggtattttctgcatagagtaactactccatactctgttatagaacgaccagtgcatttctttttccgtgagtttggcgatgtttagtttggcaatacgccgcataaccttcactttatatgcatataaagtcgaagtgcctcgaactgctcgactttcatcctccgtcgcctcaccatccaccccattcgcctagacatttgagatcctagattgagtctaaaagcatacatatttccgagtacaatgctcctcacatgctcctaccgaaagctagtacatttggcaagcgcctgggaatttggccaccagaatatcttctatattataatatcagaatcttgacattcaataagttgcttctgaggctataatataccacactcaaggttttctggaagattgatcctggcccatacttcaagactgctctcggtcttccgaggattcgccatctgattcttcagataacttgcaagataaagcagccatgcttccttccccgtccaatacccgcgctggatccatagcactttgatatgctccagagtttgcaagactgtagcccccctccctccaagtcatagggccagtactggcacctttatcccatgacaaccgaaactaagagcctagtcagcggagtccggctataatgaccctaataagacgctcaaacactgcgtaattcttgcccctaactgctagatagagtggcatctgaccattcgggttcgctccatgatccagtaaaaaggtgaatacgagctgaagcctaccagcttcttgacgcagcataggctcttgtgcattgcccatggggatcctcaagcgaatatgaaatggattattttccagttgtttgtttaaactacaattcgcagtggtcgcttgccatcttcatagacatattccagatccaccccttcaccaagaagggctttcaccacgttgactcgatcatatttaatcgcttccgctagtgtagcttggtagttaccatcctatattgtgcattgtagagtttactctgtgctattatttccatacagagctagttccttttctttttcctataatatttctataataccgcgaagatatatcctggcttaaacggtcaccccttttggtgttcccttttggtgttcccttttggtgtttaaaaccgtcgactgctctgtgaatacttcgcctctcccccactctgatacggtgggctgacattcggtgggatagaatattgtacttattcatatccacaggataacccttcacatcacctctaggaagcaacagtgataatatgccacagtttcaatgtcaggtcccgggctgcacttcgatgtcatattcgtcgcaatcatgaagttcccggacgatctctcgctcgccccatacaggcctgtatgatatgaggtgtcggatgattaaagcacggttccaaggaggcttgccatgtacagtatagagtgttctttgaagcgaggcatgtgtatctttgatggtccagtgcgccccgatatcgaggtcgctcgaccagattccgaagaggaaccctgggagtacgggtggtgaagatgatttgatcaataccttccactaccttcctcgagaattccacccaagtatagaagaggtttgaagggctagatccgagctgatctcacttcgagagacaattgtggcaaagccatcggccaccgcactaaaatcgtgggttgcattttggtatggaaggaagaaccgtacattagcctactgccttctgtcgtggtaattgaaaccatgtgcggaaggcgcggtgtccccacgtgccgcacgagtataaaccccccctcccccccctctccccctctccctctccccttcacccttcccaactcctacttgacatgcgtttctgcattctctcccgtgcgtggtatgagttccaaacgtgttgttcggtgcagattgtatgaggcgttgtgatataccgttccttggatctgatatattatcggaccttgtatacatcgacctcccgatgatttttgtaccccgctgtattcataggacatcatgtgaaagaaaaaagtcggtcacaaacaaggacatatctcagctcgtagatttaaatgctgtacaagaacctggggtttcgatcgcccatttcttggatagcctgctctgagagcgatgatattttgtcgtcctccaatccctgggccctgcgtttgttgataacccggtaggaaacccacatgacaccatatacaacccccgcaaatcccaccattgccagagtgacagcgttcccacggacgaagcgcgggccttccgaattaggatacaagaaaggggacataactccgctgatgttgccaaaggtaagctgcaagccagttgcgtaggtgcgttttgcgtatcggggcagattggtaggcaaccaggcgagaggtaagccgacagcaacgtaaagtcccagggcgaccatcaaggcaccaaagtaatgaacacccgagaacgagtccgaaatcaagattccatagccaacgactgagatagcgcagaagagacatatgaaaaatgcacggtgttgggtgcgatcgctcaaccaggcaacgcacagataggcaaaggcacccagtgcatagcaagggattgtcaatgcctggacctcggcggtggtccaatttcccatgcctttgataatagtaggaaggaaggtactatatccatagagcatggtatcaataccaaactggccaatggagaacgcccagatcttccagtctaagacaccctcttttacatccgcccagtgaaacttctgtgcagactctgtttggccgatataacgactccggcgaagggtaacaagcgctcgctcctctttgtttagataataagctgtgtccgggtcatctgccaaggcgaaccaagtcaccacaccaagtaaaactgtcggaatcccctcgatgatcatgatccaacgccagccgcgaagtccacagatgccgtccataaacccaataccataagccagtaacccgccaaaggctcccgcaatagctgcactgctaaagaggtagcttgttcgcaaggcaatctcacgtttgctatagaagagagtgaggtaggtgataaagcccgggaaaagacctgcttctacgactccgagtaggatccgacaggcaaccaagtcaccataatcccgagtgattcctgtgagggttgcaatgataccccacaaaattgagatcgtggcaatataccgagacggccgtagtttcttgagtacgagattcgaagggacctcaaagaactgaacgtgaggattagcgtccgtgcggtgactgaattgcgtgatatacatacacagtaggtcacaaaaaggatagacaccgagacttggtactggttgccaacaagccccaagtcctcttccaggccgtacaatcgtgcatttccaatgttgactgcatattcaagtcagccaatgttcttgattccgagttggcacaagctagttgcaatcacaaagggatgagtcaggcatcccacccccacgtacctcggtctaggaaactgaagagatacaacaacaccacgataggaaggatatgcaggtcaatcttcctgatcagagttttctcgatctgttcttcatcaagagttggccctaagctgatttcatcggctgggccgaggtcaggctcagcatggcccatggtgcgaaagatcaggtagaaacaatgatagtggaatggactcggcccctgggcctaggtgtgtcccccgaggtcacttcaattatgttccaaggttaagaaaatgtcaggccgaaagcgagaaagaatcaaagttgccaagcgccaagaggtcgggtaacccttgcagccgattgataagagaaacctacggagtatgtaactgtgttatactttttcttatttcttcggattttgtttgcaagtcgcatcataatttgaaatgtagatattaaactaattaccaatgtacctgcgtagtcctggttaggtagtcctgagtatataacttcctagttcgttgactacctcgagattcgcatatgctgacgtaatatataaggcgcctgaggtctaacatggatgcatgagagcgtgatattgtcaatacaagtcaagtccgatatggcaagccctattagatctattaataggacctagagcaaccataggacatgtatctagctgtagtaaattgttgtggttgtcacgtgccgatcacatgctgatgtctggtttgtcaggcttcacctagctaaatcgctagatctcgatcgttgtagggaatgtaaccttctacatatccctcaccgctcaaggagatcttatgcgagtggctgagaagcacccggaccttccttctgggtctcttgtcctcgaagatcttccagaagtcgttgggcctgtcgagctcaccacggacaaaatcaggactgtgccgcatgatctcttcgaggagggcgtttaaagcccgttgaaggtatgattgttcattctaactgaaggccaaatttgacgacctgaaactccaagcggaacagaaaattccctcgaaggctctgggtgatttaaacctggaggaggtcgagagtatctttgagatccagccgcttcgatcggagaatgaggagctgggagatgagtgggacttacgacccattctccgagaggagttccaaaccccagctgcctttgacgaattctacgatttcctcagtaagtactgtgtccttatggtttccaagtttcactcactcatctatgaaaacagtgaaatcctttgaatacctggacgttgcctaaggaaagtccacccgaaacgaggcatatatacgctctcgtttggatatgatccttaactttgtgctcggctttataaagaaggagggaagcttactcgccagaaaggagctatcgtagggatacgagacgcacttttcctatacaatagatatagcgggagttgcaacatttctttgctaccttgctatcttactaccttgctatcttgctactatgcttggtctatggaacttataacatacctaccaaaagtgaaaccaaaatcatgatactgtagctcttatgatataatgcaaaaatccctcgtctggcagcatggggtgccgaggctttgaagtacctttgtggctgctccttataacgaggagaagacactaagttttgtatgatcatattttgagtatatcgcctatatacaattaaagacgttttggttgacatgtcctattttgaatattctaatagggttgggggatcgggtcggccgggaattacgttaacaactcggagtacctacctgtagtgtgcctcttcttagaagtatcaaagtctacatgtaccctagacagcaaaatatgaaggtcagcagatcaggatcgaccggcctagcctgcttacctaatggcaaatcccgctgtcatttttgcctatttgtggctattatttgctgcagaaagaggaactatcactttctgattccttctgcaccatattcaatttggattgatatctgccatgaacgggactttttcccccggcgattctgttccccccgcaatgcactgctgacggacacacaatctcttatgacttcacttctcactatgagaaatccttcacgtccacgcgttttacagagcttcacaatcaacttctgaatcttgctatttgaaggtttgtttttctttctccaccatagggagatctagaataacggcatcctgggtctcgaacaatcaaaatccatcaaaatcaaaaagtaccgcttcaagtggaccaatggcggacttagtcattccttcctttgggaggctagttgcatccaaaactcttgatggccatactggcttcgtttgggatgtggctctttccggcaatggtcaaatcctcgcctcaatttccaatgacatgatgatccgtctatggaacgccaacaccggtctccagcgcggcgccgcaagaaacaacggccattccacgtgggtgcgctctgtgaggttttcccccgcaggtcgattcttagccactgcttccgatgatatgaccattcgtatcagcgacgtgaacaccgggtttacctaccgcatgctgcagggtcacactggcaaagttcgagcggtggaattttcccccgacggcaaaactctcgcttcagcctcagatgatttcactgtgcgactgtggaatgcaggcttaggttcgctggtcaaaaccctcaatgggcactcgggctgggtgcgcgctgtggccttttcgcctgacggcaagactgtcgcttcaacctcggacgataatacaattcgtctctgggacacaaccaccggcaaagaaatccatcgattaaatggccatgaatcctcaaccagggccgtctgcttctctcctgatgggaagctgctagcgtcgggttcgcaggacaaggacctgcgcatctgggatacgaattctggcgccatgctcaacgtcctccggggacactctggacctctgcgcgtgatcgcattttctagcgatgggaacctggtggcatcagcggccgatgacctgacaatccgcgtatgggctgtgccattagggtttacctgcgtccgaatattaacgggctactccggatgggttcgagctattactttgtcgcgcgatgaaaacgtagtagcttacacgtctgatgacatgactatcaagatttggatttcggcgtgattttctgtcgtggaaggaagatccttctcgttgatgcgcgctttgtgttgaatttctttttatctgagatacccaccaatgttcttgattcttcagctcgcatgcaatttcttgcgattagcaatcaacttatttttaagtgatgaaaagccggaaccaaaacccgtctcctttacctcgtttgaacagttgggtcgaagtcgctagaggcaaccaagatcttccactctgctcaagaacactacatcaggttttcaagtccacaagtctacttatataaaatggcagatacgcaaacttgttgggtgcttcgcagatccctacctgttcccagtgtctgcattgatatgactcactcggaatattttccaggagtcaatgggacagcatgtgttgctactatcccaatcgcaaatgctttttggcctagtaatctgctgatttccatcgaaatttctgactcaattcgatggaatgtgcccttcaacacttatatcctgcagtacatatctttacttggactgaaaccatgggcccatcaatttcaaatgacaatcctcaccaagtctacgatgaagttcataaacgcgcaatcacggaaaatgccttccaggagaaggctgagatacaagaaactcaccagtccttgaccattgattttgaggaggacgaccccggaaacccactaaactggcccagatcaaagaaatggattatgacaactgttgtgtccctttcagtgtttctaatgccactgtcttcgtcaattgtcgcacccgagttgagcaccatcaaaggcgaactgcacatgagcagctcactagaagcagtcctggtcctctcgaccttcgtcctgacctactgtctcagccctctgatactaggcccactgagtgagatatttggaagagccacagttttgcactcgggaaattcattctatttgatcttcaacctggtgtgtgggttcgctcggaataaaggcgaactactcgcttctcgtctgctcagtggcgttggaggcgcgggtggacttgttgtgagtatgcccctcttctgcgactagattttgttctaatgcgccaaatataggtgggcgcgggtatcatcagtgactgcttttccaaagaagagcgcggctgggtcattgccatctacaatctcgggcctgtctttggaccttctctgggagctgtcattggtggatttactactcaatacacgacatggcgctggacgttctgggcgacatctatcttcgacggggctttgatcgtggttggtttgcttgttatggaggagacatatccacctgtcatcctcgcgaagagaaaggcgaagatgctgaaaacggccgtgacaaacactcctctattgaagacaccttatgagaaaccagaccagagtctcggccagttataccgcaactctcttctccgacccctgcagctcctcagagtccagcccatcgtccagatcctagccatcttctacgcctatctatacggtctaatgtacttggtactctcgaccttcacaactctttgggaagagaaataccaccagcccgtcggtccagctagtctaaactacctcgcgctgggaatcggatatttgcttggttcacagatatgcggatttcttgcggacccaatctacagagccctgaagaagaagcatggcggaaatggcaaaccagaatttagagcagttctcatgttccctgcctcgattctcgccccggtcggtctgctgtggtacggatggggagcgcaggcggtcacgcattggattgtgcctgatcttggaatcgggctgtttgcctgcgctgcgatgattctgttccaatgtaccagtgcatatctgtatgaagcttttactttgtatgcggctagtgcgacgggtgctgtttacattcttcgtggattgacggggtttggatttcctcttttcggaccgaggatgtatcagtcgttgggttatgggtggggttctactatgcttgctcttgttgctattattatgggatgtccggtgcctgttgttctctggaggtatggtgagcgacttagagctcggagtagttatgctattgggtaaagtatggatgactcaaaagcaataattcacttgactttccacgcattatggaagtaggatgacttcataaaacgggcgcaacgcatgaagctaacatcaagctatgtaacctcggttcaattctcctccgcattaccgggggtatagctttccccccagctttggacttggattctctaaccttccaactatcgattgcaacgatttgcaatgtctgataactacggcagctaccaaacggaaatctacggcaagggtgccttaatgagcatcatgcccggtgtaacaaccgaccccaacaagctagaggggcaagctcgacaatttctgggcgttcgcgcattcaattatgtcgctggcggcgcaggcgagaaagcgacgatggacagcaaccggctggcattccggcagtggaagctgtaggttcgtagatgtttattacagtattcgaacactaacggatgagatcgatagaatcccacggatgatgcgaaatgtgagttgcggcaatctacaataaactactattacgttctcgctaacgggtgacatacccagacaccggagcaagacgtctcggtcgagctcttcggtcagaaatacgataatcccattattgtagccccggtcggcgtacaaggtattttccacgaagacaaggagacaggccttgcagaagtatgcgaggaggtcggagtgccatatacgatgagcacggcaagcacgagctcgattgaagatgtagcgaccgccaacaaggacgggaagcgatggtatcagctgtactggccgaaggataatgatattacgctgtcgctgctaaagcgggcgaaggagaacgggttctcggttcttgtggttaccttggatacctggtcgctggcgtggcgaccggcggatttggataacgcctatgtgccctttatcaagggggtggggaaccaggttgggttcagcgatcctgttttccgcgcaaagttcgagaaagaaactggatcaaaggttgaagaggatatcattggtgcttcgcgcgcgtggatcggtgatattttcgctgggagtccgcattcgtgggaggatttggctttcttgcagaagaattgggatggaccgattgtgttgaagggaattcagcacgtggaggacgcgaaactagcgctgaaatatgggtgtgatggcattgtggtatcaaatcatggtggtaagtcccttgattagctttttacatgttcttcctctgaacttttgtccaggccgtcaagtggatggtgctatcgggtctctggacgttcttccagagatagtcgatgcagtcggggacaagatgacggtacttttcgactccgggattcggacaggttcggatgtgattaaggcactgtgcttaggagccaaagcagttctcgttggtcgaccggtgatttacggactgagcattcagggccgagacggggctagacaggtgctaaagggtcttttggctgatttgtggcagaacatgggcctatcgggtattcggagggtgaaagattgcgaccggagtcagattcgcaaggtgcaatacggagaggtgaaagcgatgatgtagagggaatcagacctggaacgtgtatagaaatcttggacgtcgatcacatgtgaagggcccatcctcgaatctcgattgttggggtaccaactggcttacgcctacacggacagccttgaaaggccactgtaaatgtaaaatttccatggcttgaatattctcattcttgatatgtttacaaaatccaatgaccggggaaaacctgatatcgagacgaacctcgactatgcgcacgctcacattccagcctcaggatcaactctgctcccgcgaccagtcgcgtcgttgatatctttgattacacaatcaacctcgctatcgttgcgactaggtacattctttggcggggtagccctggatggcgcgcgagctacgactttgaccagcttagaactaagccgggctttggtcgaggggatcttgacgagggcaggaagagatgtcgccattcgtagtggcgatgaacacggtaggacagaagccgagtctctcctcgagcgaagtgtatgttcctaaatcctccaaggctgtcgacttagtcttgactaacaccctcctagttggcgacgctccacacgaccgtgacctcggcatctttcttcgcggcggcgacatttcatttctcgtccaccaccttgtcttcggttgcaaatctctcgcaggcacttctgtctactctggatgccattcttgggtccaccgagtcttcgagggccattgcggccattatcacgctgattcggcgtgagtttagatccgttgagcccggcgcaagtactaccgagaatattggtgtcggagacctcctcattggctccctaggcttcgcgctattgcagcgttggggcagaaagaataccgaaagacatctccggcagaatggcggggatgaaattgtttgggatgttgtcatcctagacaacggcgcacgagcagacgtgatcggatcccatcagctgcaattccccgagcgcaataatgaagagctggtagagcctgacagtgcttcctttgtgatgcctggaaatggcgagaaagcatttgatgtaattcgacggtcgagcgtgtctgattcggttggacatcgtctctctattccgttgggtggccagcagcaagtgtccgacgaggatattcgcgcttatattatgagccaacttcctcagggctgtcacgcatctatcaagtcggaaactctgacggcgcgaactatcacagtcgatatctacgatgataatatggcagagattgccgccccgcctggaacgaaactgatagaggagagattccaccatgatcatgattatgaggataccaatacgtccgatcgtcagcgacggtgtcccaagcatacagtggtgtttaggacagccttcaacaaatcccagagcactcaactgcgatcccacgacggctctggaaattttgccctacctgagtctgatcatcataaacgagcattgccgggaagctcattgactaatagtccaatgaagtctcatcatggtccgtcacgttcccatctggataccacgcagagcattgcccccaagccgcgtgggacaactcccgccttgccgaatgaacatcccaagcctgcacttaccaaaggctcattcgcgaaatttgcacaaaaggttaagccagctgttcttgaaaaaaatgaggccaaacggccacagggaaagaagccatctatagactcatctgcgccctcgggcattccaagtcttcgtctacctcctaagcctacaaaaggaacagcgtctgtgaaggaagcgacggcgcgagaggtctctagcagacctgatctcaagaagagacaaactgaacctctgaactatcgaccgacaacccctgtcccgaaccggggtttacgaaggtcccccttcccaaactccccccaaagacaatcgtcagagtcgccaacgaaacacgccctatctcacgaaatgcacgcctctggaggctcacgagggggccattttacggtgcgagagaacagccacgagtcgctcctcactcaaaccgacacatttctttcacgccgtagtgctggtatgcgttctggatcgcctgccgcggtccagactcacgttcgcagcagcagctctatgtccataacaagatcagaagcagacgggactttatctgcgaatgataaccgccccggatcgtcagctatgcaccgcagatcccaatcatacacccccagcctgtactccctagcgactgcagggtctgagacgtcactgctgcttgcgcaccggcctcgcaaaagtgcatatgaagacatgaaaaccatacaggcactcaatcgcgatggctttgttccaggtatatttccagagagacacttcgtgcaaaacattcgccggttctcccggttctcctctgcttcatacggctcgaatgcgctcacggtcatgggtgttcctagtggctcgaagaatatacctagtaccaagtcagacagccacgagcatagtgcattctcagagaatgcaggccttccaccctctacgatcctcctatcttcattcgtcgatccagccggtggctcgaatgcagctggtgagacagagacaggcttcccattggtccactatctttctatcgaccatgactccaaagccgtggttctgactttacgaggaacatggggcttcgaggacatcctcacagacatgacctgcgattacgatgacctcgaatggcagggtaaaagctggaaggtgcataaaggcatgcacagctcagccaagcggctcctagagggtggcggtggccgagtcatgatcaccctccgtgcggcactagaagaattccaagattacggtatagttctatgcgggcactcgctcggtggaggagttgcagcccttctcgcaacgatgatttcagaacccaacccctccacaacaggcacatccttcgtaacagcctcataccaacccgctgcccgtccccgcttcttgactgccgatagtaatcccagcatcccgaaccccagcctaccaacctacaccatcccagcaaaccggccaatccatgtctatgcctatggtcccccagccgtgatgtcccccttcctccggcttgccacgcgaggcctaataacaacaatcgtcaatggctccgacatagtccccagcctgtcgctaggcatcctgcacgacatgcacacagcgtcactgtccttcaaagacgatgccacaggcgccaaagcgcacatccgccaacgggtcagcgattctctccgccaaagcatcatacacaaattctacgtcaaccagcctccgctggtcgtcaacgcgggcgatggcgtgggtgaagacgcttgggcttggaaaacgctaaaactactccgggatgagatgcgtgcgccgaaactcatgccgcccggtgaggtttttgtcgttgagacgatgcgagttctgcagcgggatgcgtttacggcgccggagctcggcgtcgatgggtatccgcgtcttgggaggcctgcgactcgcgtgcagattcggtttattcgagatgttgatgcttggtttggtgagttgcgctttgctggtggcatgttgagtgatcataatcctgctcggtatgagactagtcttgctgcgttggtgaggggagttttggatgagtagagcttgaggattctagtatccatgggtttttatgttctattctcatttgggttgatggaaagttggatgttggtcagatatattctcctctttctttggttatttgggattataaggttatgttggtaatgatttgatgatatatagggcatagatagacaagaatgaccatttataagttaacaattaacaattaccttggaattgtgaggctcagccattcttcctgatttgagtagtagccgtcttaccatcccaccattatcatacctagaaaggtatgggggcggtaagacgcagttgatggaccatcgatttatggttaacaaagaacaatgctgtaggcactatgaaagcagctacaggagagaatataagagagaaaatagggaaagaaaagtagttttgatcatagaatatacattgagaatcgtaagtttatagtgtatagaaccgacccatctaaaccaaatgggaatccgataaatagaatcaagaccaagatccagggtatcacggcatcactcgcaacgccaaacaaaagaaatccccacctaacaaaagaaaaaacaccctccaaaaaaagtaaacatgacaaagaatcagaagaatacagagagcaaatccacaaccacttatacaacaagcgcagtaggggcaggaggagggcccgggcgaccagagtggcagccacgctcgtggcgcttcatattgctgcggacagagaaagccttaccgcagccggcgtgtgtgcagcggaagggcttctcgccagtgtgagagtgggagtgaatgcgcagggaagaagggcgcgagaaagccttgtggcaggtacggcagatataccggtcgtggttctgctggtacggggctgaggtggagggcgggaagtagtggtggtgttgccaagccggggtgacgggggagatgagagccgaagacgagtgcgagtgcgagtgctgcgtctggacagtgggcatctggggggctgatactggcgtcgagggctggaaagaggatgtggttggcgggcgggggtagtacattggctgttgaggagcgtcgattggagatgtgtacgatgaaacgcttggcgctggcgaggcgtaaggtgctgtgttgcgcgggatgtggattgagccgttgctagagatagaggaacggtgtaggtgatggtggtacgcttccttgtgagagagcgactctataggagatgcgcgacggtgagcgtgaccagagccggggcgcagaggcggtgttgggggcagctcatatgactggacccggacgtgacggtcaccaagagatggtgagagacgctggcgctctggaaggtatattgattagcgaatgtgctttgaaattgtagtatcgttgaaagtactcactagctgcgtgctgggcaccatcagcaccctcaaagagagatgagattgaaggcaatgagaccttacgctcttcggccggtggcgacattggcggcgagcgcttatagtagctagactcgagaggagtatagatcggcttgacggccgtgctgtgggagaggaggttggcgagatccatgatgaagaagacttgtttgagaagtttgatccggctgcgtttcaaggttggctttattcagtgagtgggggatgccacgaggtttataccagaaagcaggcggacggcttaagatgatcgccagcggacgatgccgactcaggcaaaattccgatttacgttacggcatttttaaattctttttaattctgggattttcataattgtatttccctttattaattctttttcgatgtggtctgctccaaagcttaatttaattgattttatttcttcattatggagtaagtttaataaaaggcatttaaaattcatttaagcgagataaacaattaaaaataattcttttcggagattaacgtgggggggaatgacgatccacccacgcgaaggcagaacccctaaccttccagccttgtgggatgtgcagcgccctaaacccaaattgggaggccgtaaagaccccgttggaggattgcacctcggcttcggttagtgcagatcctgctcgacctgtcacacatcccaagccaccccataaacggctgatcgatcagggatctgttgatctgcgagagcgatgaacggttgtatacagagtagacattgataatagccattctcggtgttttgatctttgaactgggataataaatcataagataggtgccaaacccggggatgacacggttcaggagatcattttctcgcgtggctatggagaaaaacggcgcgagcgaaaagggaaggtcacagagggatagcactagtccattttgggccacatctccggaaccttggaatcatagttacgcctgcgctgcttatacgctggtcaggctactccatacatgatatccatggattgactatgcccggcgtaccggtacggagtactgtagatttaatttaatatattaattaccatctcagctgtgtgatcaccaagggcggctctaagcgctgggggcgagagagaggaatgcctgaaacagttgcacaatccatggccctgggctcgcttacacaaaccttacaggcacagtgagcggagtacatacattgaagtatgtatgtatatgagaaaacttgtttccttcccactctggtgcatgatacatagttagttatagttacaataacccatttagtaattcactctctagtcttggtccaataatggatatatggttggagaatcgaaaatggaaagatcacatcagcaattgaagacctcatacgggaatactccgcctagagtcgaccatgctcctgaagatcattcctcgaagccatggaactgaatcatggctaccagcgaaaacgagttattgacacgatcggcgttctggaacattactcctattaccatgttacctgtgatcatttctagccgtgcacggtttctgcataggagcgattgaggattggccgttagggggtggattcgtcccggcctcgtggaagcgacctccactatttagccttttacagagagcgagatcgccggtgaccgaggtacataataaatatccattacaatacagactgtacaaaataaagcagggaatatagattatacatacgtgtatccattcttattcatcctttccgtctacattccgtatctcacttggcaatccacttaggcaatagcatgcttatatgtgtatctatttattgatcatgtactattctagaatggctcgagcgttaggatcgtcccgggcctacggatgatcaacccccttgtcggcacttggtacggatcgcctattctcaaatgagcctggcgccggtctttgtattccgcgggcattgattgggtcacccttggttcggctcagggtaaatggatatttgacctttcctattcagctgtcaaaaagtcatgtaaatcatagttgggagcgtgccatatatcaatatagggaatacacttctagagctcctcctgagaaacttgacgcgccgacggctttttttgcttttggtgctttttctttttggtcatgaaaccgggaaaagtgtgatccgctcaagtcccatgggagcgattttacgctttgcgcttacgtttggttttgttgattgggttatttttccccctcttctaatgcctctactccgtggggagtactatatcctactatatttatcacgactccgtgcacattctatttttccaacaatcgatagtctggtcaatctcaccgaaagatatcatgttgagggtgatcgagctatcctctttaggtcatagacccgggtaggtagcggattcagccgtgatcgctgatcgtttcttgatcccggggcactgggcccatgccacgcgactgtctcacccctttctttcgggacacacaggcttgtccgggtcgagttaatggtcgcaaatcagtggggctgaacatgtccacgcgaggaacttggatctttgcagatgtgatatcttgtattcatgctcttcacgagttatacgttcaatttgtccactacaaggtactggttgccttgcgaaagggttgacacatggcacttgcatatccatgcgccttttatgtctgctgtatcacatatcacatcgtgtagtgtttcatcgagggaaatccaaaactataattaagattaaatccctccaagcgtcaaccttgacggagttctcaaagtttaagaaagtggtctcaatcttctttcgaacgtatgttctaaaattgtcgtgaattaccccaaatccccttggatgccgaggtcactagaaattctaaactgccaagcctgctacacgccgatctgggattggtagatccgatctcacgcttgtactacttgggaaggtgcctctattggacggtggacgcgccttggcaatgcaagtgccacgcatacaataccttttttttctttttcttctttcctccatttctccatttcacgtggcaacaagccctaatctggcattcagtccgatgcacctgtctgcgtccgatcactaggatatccgcatgggatcttcccgcgacgaagactgcagtagtgcacggagtacatattatatgctatttatgcaggtattggattattgaatcataatccgaacgtgtcgaacgacacacttttcacctttatattcatttccaactggataatatcaatctgcaatcattgcatatatacagcatagaaatatactttgtactactccgtatatagtaagtatatcaacaacataactactccgtaggtagaatacaatatacaatcctgccaactagtatggaataacctccttcctattccgaaacgatcggtggatcaacgaagatcccaactctagggggatacataaccgatggtcatagctcccgctgactcatttcatgatcgcccgccatctctaagcgacgaccgtttagggagtgtctccgatgcggtcctctacgtaataatatgtcgatacatattgttatgcggtgactcgtatttggctcctcagtgctcatgcaacgtactgtggtactaagcacggagtacggagtagatttagattagatacgtacctgatctgatgatgtctgggtcaattcgccatgaactggatttccacgctacggagtaatattttcgatggatgacaccttcgtccgatacctcgacggtgtttgttcatttttcagccccccaaaaaagggaacagcctttctacaccgtagattgtcataagcgtatgaccagccgcacccgaacccgaacactgaaaatcagggggaagaagtaataatagaatgtcaatgctaaaaagcaaaaacgaagaccctgagttacctataatcggatgccaaacgagggatgatcgacagcgatcacctataatatacggagtacatattgaccgtctcaaaagaggcagatccagcgaaagggggcgtgtcgcttccacagagtcgggcctgtgaaaaacaccgaataagaaagcagggctacggtacaatcctaccgaaatctgctagtcccagctaggtggacggagtgtagccggaacgagtgttaggcgagggacggttagaacccggtatgtctgaactgtatgaaacaacgacctgttcgtcgtggccgatcataaaaatctagcgagattaccggcgtcttaccggggtaccatttcccgcctcggtacaatccccgtgtaggatcggccgtggggccatcgggctacactcctcatgttgtctaggcgaactgaccatgtcgtaggttccataattttgcctccaaaaaaaaccccccgagaacatggaggtgatacccgacctatcgtcatagttgtagatcctacggagttgtgctcctgtttatttcccctttcgcgcccgttctcagcgcatcggtagatcgggaccactttgaccccctccgtgtctctgctacggtcctatatagttactagtatgtatctggatatctgcgatctgcactccgttcgctccactggagctatgaaacacctgatcaacttccctgcgctagacccatcagccatatccgaatgaagccatacacccgcgcatagtcttcggaattgtctgatagttcttgatagtcgcttttatgaacgacatatctattgcttcggtacggagtattcacctatattgtactgagtacggagtactccgtacaacatacatcgatggacggagtgcatactccatggcctgcaaaagaataaagttcatctttgattactttgattaaggtcctgcctatttcggcatccaacttccaagtcttccttttatttagctttctgtttttccactctgatccgtcgggtttggtttcgggtctttgttcggaaggattcattgtcgcaaccgttgagatcagattccaacccggtgactcaagattatgtgattactcgggatccactcgccgaggattgcttacacattaccaaccacacaccgagcacactacgtatgcaagtacggagtatgcaagcaactaattcggacatactccgtaatccataacagcggggaggagtggacacgagtctgatcatgcccagccttccgtattccaggcacacgacgatagtgacatatacatacgagaccaatgcccgttgtattgatcgcttactgggatgcaatgccactgtaatgccattgaaacaagaattcagcgcctacattacctttgcatggtgcatacttgtaactaactagtcatatagagtttgttactatttggtcgcatagaaggcaatcccctaataatcctctgtcggagaggcaatttcagtgtgaaccttgtacaacatagaacgtacgttgcacgttgtaatggtgtgcacgctaatggtagatcctgggtgatcgaccgtgtgattttcacggtcctgttgtttcatgtcggcaattgcttcttcatgtgcggggattgggtaggaaaggcgtatgcgttgagctcattattatgaaagcattaccccgtacgccattggattggtagagatgtctttcggttactataatggtactccgtagattatactaccgttgcattctaggcttttacttcgggggggtgggcgcctgggacctgctggcttatagatccttgtacctactagttcacctcgccacaccgtggtccgttgggtccacatatgcatttaggtggcatgtattattggataaaggatggcttgggtcccgtcttcttggtattggttatcctgcgccgcattacaggcggatcggagtcctgctcaagtaggacaagtacgagtggaaagggtttgcttcgtacatcctctattattatatgtagtcacaaggtacaaggtacatgctctcaataataagtgcaggctgcataagcagtctgcaatgatatacaaccattcaagtcaccaggccgcccagatctgaatatgccgggtgtggccgagattgtgtgacgcttgaacactggctctcgtgacatattacattgacaatatatgggctattcaactaggttgcggtgtttctttgtcttcgaccccaacggagtactccggtactccgtggtgagacctcaagccacgttattgggggccgttgaaaaggatcaagcagcagagtgaccaatgcgctgatctgagtctgcggaccgtgcatggctcccagcgctatgatgcatcacttggcttagtattgaaacatgacgtatcgtctttgtaggtaagaagaagagaagtgacttcactacggagtagataggggtttccaaccttcaagttggaatagaaataagaggttcgttttgcgaggtggggaaatgtccgcaagtgatcccaactaggtaaagagaaagagaggatataatacacatacaaatatcaagagcgtctttacaatgcatcgtagaatatcgagccaacggaccaaaaagcagcgtcgatcagccccgtgcggtatatgcatggccatctcgataggggatgggctagagatgagacaagaagagtacagttgaaatcaaaggagacaaagagcaaattagagttgatcttagcgaaaaggatgttaatgccgacaggtcattggtgtgcaatcctccggtgatcgaccgaaatgtcgatctgagctctcttctttactgcaagcgatctatttctctttcggtcgaatggtccgatccgagcatgagaatgcttttcgaactttctaggccaaggaagaaccaagagaaaatcgtaaacggttgtatttgacccctttggccttggagcaagttcgtcctttactgcggctcccttttggccccgtatgcatgatcggccactccgtgtctgtgcgagtgcttggtccacgtctgtttccaggatctttagtctgatcgtcatatcttctgacatttcgtcgagcacaatatgctgatagagtataaaaccattgctcgtggttacatcgaaaatatgctccttgttcttagaaattagaaatctacatactctggacaatagagcccttccgaggttcgaccgacagattggctaaatggggtaataggataaattggtaaattggtaaattgggtatcgcaaactgagcataaactaaaaacctcaagaacttcgttaggcatagacgtccacttgaccattgctttgcatgggttcagatgggccactggtgatcgctctggcggccaccttcctcatgttctcaattgccttcttgaagttggccttgtcataatcttcgggcatatgctctccactatagatgcaaagcacgcgcatacccggcttgtaagagagttgttcaagcagcttaggtgtaatgaggaagtactggccgcccccgccaccgccgatggggttgccgccttcgtcggtttcttcggtttcgtccgaggcacaggcaatgtccaccaggcgtccgtgaaccatgcgctcgtttcgcgggtccataccttgattgatctcatccacaacgcggaatggcgaggcggagagcgactgcagtgccatgagatagaagatggtactcaccgctcgttcaccaccggactggcgatgtgaatccaagactgacagccccgcgccctgacggaactggacgtgaatcacgatcgaccactccccgaattcgctagcaccaggctcgccattgggcccagcttcaccttccgctttgcccaaggtgacctggccagcacatccaatgcggcggaaagaatccgagaaggcatcgctaatcttctcgatgagcgcttccaacctaggctcccagtccttgcggatgtccgtgatggcgttgtcaatttccgtaagcttgttcatgaaatcggcgagtttggagcgcaacttctcaatggattttccacggtcttcgaattctttgatcatctggctactaccaccatgggtgagttctagtcgggccttctcagagtcaatgtcggcttcgagcttatctatgtcatgatcgttgagttcttcaagtagagattgcgcgtcgggttggtcgtgcagttctcggctgatttgctgagctttttggaaaactgctctggccttcactttggattcccttaatttgactgtagcctcctgcgcctgtcgtctctttgtttctagtaacttcgtactatcaatgttgcgatgccgcagggtctgaaggtcggaagttgcctccaggaataggacctcgactttcatgagctcctcatgagcttgacggaacaattcgacagcatcctgcattccgtcagatacggtagatagaaatgtcagtgatgaacttacggcatattcgacagcgacctcggccttttgaattgccaattcgtcttgctggttgcgaaattcacgaactctctcccgtaccccatcaaacatggctgtaatgttttggagtttggcctcttgttgagctgcaagcagttagacaaatcccagacggcagaagaacaagaaacgaaacatacatattttctctgggattgctcggtactgagtgtgagccgtctgttttgcgctcttttctttctcgatgtctgtctgtagtacgattagtatatcgtgtgacgaaaacaagaggactatgcggaataccatttctcgctcggtctgctcgtgttcttcgcttatttttttcacggcagccctttcggactcgagcttctccttgatgtcctgcagctgttcattccataacgtgatgttctcttggtgttcacgtttaagggaaacatcaacaggctgttcggtccacacctgagcaggcttgatctctcgaacccgagttgatgtggcaccaggtccatactctctacgccgagtcacttgatagctttttttcccagatacccaggagctcattgaaccctcctccaagcgggcaaaaacttcatttgaaatttcacgcagtccgataggagtcaagtgtaggctcttctcactgcacagcatggcaatgacaggatcgggcccgaccagaaaatcccttgcccaaccatcgaatcccaattgggcaagttgatcattcgtcattggaggcctcatagtatccaacgacagcgagcaggtgcggatgctaatgtcatggagtcccaatgtttggttaatcgcaaattgcaaggtgcgaaaatcattcctggtctgtacggtgaacgacgtgaagtctgtcttctggaataaagactcgacagcatcggcaaatttggggtcggtgattgagcacgtaacgattggagggccgaagacttctttttcaaacttgctttggttttcaagaagccatctataggctttcaacgtatcgttggaagatttctgcaacttgagttcttgttggccggaggctgaatccaagctgcttagctggagttcggcctgcttgatactcctttgcacttgctgttgctgctcctggagtggctgtctcctatcttggatttctctggcctttgcctcaagctcgcgtttttcgcgccgtttctctctctaatgttgtgataagtatgctggtccaaatcggaagacatagggttcttaccaaggtctcgttgtagaattccgggtcgaactccacggcctcctcttcttgttggcgtcgaagtctatggatagcttgctgagcagatgctgcttcggacttgtgcctctgaccactctttttttcggcctcaatccgacctttgagatccttcatcctattctcaaattcatcgattttttggccgcgttgagtggcgaccctagatgcctcgtcaacagaatcctttcgatcatctttcacaacgttcaatcgtgcgatataggcctctttggcgttgactgcacgcaagataggctcgttttctgcctgaatccgatgatattcacgctcagctacagctttggtaaccttcagggcctcgacagcattgtggtgttccttgtactcgacaattggacggcaacgctcaaggatttcgattttccgcttgatcacagctctctgacgcattctttcaacgtcggctctctgcatctcttggcgattctccatattttctagcaattccttgtcaccactgttgtccatctcgagtttcttctgctcagctctcagtctcttcaaggcatcatgccattgggtcatttccggaccagctgctgctcgttgcgtggaatgaagaagctcaatcggtgtaagtgcagcaaactcggcgactttatcctgaggaagaaactggcagagattgtctacctggatggcgaaggactgagccagtttcaacacatcgttcttggaagcgggtgctccgttgagtgtaaatgagcttttattgccatcgcgcttgatgagtcgctggatgacagggttgtgaccaatcttgggcggtccgcatagttcaatctcaatcgtagcctctcgggccccatgcttcacaaactcgcctagttccttggcgcgtccaaggtgctaaagatcaggtgagtatcagtatagggaggctgtgcagtattatagtccgggtcttacctgaggtccccaccccaggcctaagcagatggcacagaccagggtgcttttgcccgttccatttggaccaatgaccatgttgagctttggtccaggataaaacactgctgatgtataagtcacaaagtttgtcaccttaatccgcacgatcgcgcccggcttataaccaccgggaccaagaccatcgtgggctgtcgcacgcgggacctgagaaactgcttccggtatttcagatccagcactatccccatccctctctcgttccccttcgccttcgctctcgtctccagagtctgatccgctatcgctttcagcaaggtccaagcggggacgtttgttgttcgagggttgggcttggggagtaaacgtaaagtcttcgtcttcttcatcctcactgtgaggtcgacgacgaggaatactgggtgatgccatgcttgttggaaccctcaaatagatgtagagggagcctcatgggctgtctgtgaaattcgctttgtctggctgttctttgttcaagtccgacgcgaggaacgcgtccgcgatcaataaagtccgattagtaggcggtgagagcctcgaaatggccaattggttgcagccaaaacagcttcgactttgtatagcactcaccatgcctcctccgaatatcaagcggttgatcttaactactgcagttgtttctatcactatcacgggtactctttatggcgctcgtctcaaaactgatcaagaaattgctgaggtatgagcgaatccgcctagatcgaatttatccatttacctgcagcatttcagatctaacaatgatgcgacatagacagtaaagcaacgacaacaatcgacgtttgatgagcaaaccaaagctctccaggatatgcgctccaacctgattgctcggagaggcataattgagaaccagatacgagacctggatgcaaggatgctagagaagcagcagaaaggcatcagtggtgatgctcaagatcaaccgagtggaggtcgatgagcctatgaagtaattgcccaacggaggcaacggattcacaactaccgttcaacgcgaaccaacccacgatgcaaccggcatgctttgagtctccgaaggaccgggcaccacttgcgattcaaatacaaggtggcggctatcgactacatagttccaacataggtcttaacacccactagctgcgcagcaaactttctactaggcctgttgcacttgtttttgatcttcgagtcccacaatccaaccatggcctgcaaagtctggaaacattggacttgcttcgattgatggatttgactgcttgtacataacttggggtgctattcaaatcaactattacttcttttgtttataaacaagaatatatattttttcctctggcccgaagtgctaaagattctactagagggctggatgtatatttagcatctttcatttcccagacactgtagctttaatctctaatccagagcccctggatatgtaaaccggcctggaagccacttgaatagtgcgatgaaatcaggagacgccgttggtcgactaatttggaagctagtggcgagaccccagacgcctaagcctcgaggttcagtctttccagcaaatcatccagcttttcgagcaagatctcatagttcatcgcatcttccgagaattcatcctcaacaaccgcgccgtcgagagttcgaatctccggggcatggacttgtagctgctggccttgattggggatagcctccttggaaacattcagggtctgtacaccttctgtaagatctaaaatatcttccagcggctcgtcttcgtctagatcttccggtacttctttttcttccatcatctcattcagaccagcctcaccaaatctcaatctaaaccgctctccaagatagaaccggatatcatccagcatttcaatggaatcggtttcctgtctcgccttgatacgagatgctgattcctggatcaactccgcaaattctggcctatctatatgggcttccagtcgatatgcgagatatcgagcagcgaactcttccaatctctgcacgcgcgtcaaccacgccgctcgaacgattaagtaaatgtcaatgtcatcttcttccgcgcctcctcgagttttcgcagcctccgcctgggacatcccagcactaccgagggtgctgatgaccatggcggctttcgtcttcagcttctcaatgaagagcatgtctgcggcgaataggacgtcgacagcgatttctaaggggaaatcggctctttcggtgtataggaatgtaagaataatttccaagacttcaggcgaacagttgacgtcgatgatcgtcagatgctcattgaggtaagcttcgcgaaaagtggatgtaaacattgcctggaaaaactcagaccgcaaaagcattgctcgatggcatgggaagatgatcgatttcggcgcctcgaggttgttctcattcgcggtagagatagcgccaatagcaatcgaactggatgtgccatttctgacctctgatgtgtcaatgtcctcttcctcctcatcatcggggagttcatccgctctcagaagaacatcagcgaagattgcattgcttcgatcccacttcacttcatccaccttcgaagtctccacctcgagcttgttccccagaatattctcctggaaccattgttccatttgatctcggcccttggaaatatcgtcggttcttctttgtctagcacgtcttctgtctccactatcaaggatactgtctagaagactaggtatctccaaatacttggaaattctatccagcgctgcaaaagtctcggactccatgaagcctgtccctggtccacttcgcaagtcccgaggagcttctccaaagtacagatatttgatagccgcaccgaatgcctccggtgaaatggtgctggggagattccatgttgcagattctggtgccacggccagtttaccatggaagtatggagagcgtgccgcgaggatgaatttgtggaggtggagcgattcgtcggatgccgtcacaacaatatctgttgttaatggagattcacgggtaagaagtgtagttatatgcgcggctagcggctggagggggtccgtggacttggaataatcatattccagaaggagatttcgtatccggtcgtttaaagcattatagagacatctatagaaccaccattgttaattctagccacttcatagagaatcaattgctatttacctctcaccctgaaatgtgtctcgctcacaaagtgcaccagactcgagaagaagttgcgcaacctcataatgaccacagagactcgcctaccaggttcattgattattatgcgatacacgggattggcacggtcaaattatcaatatattgtactcaccagaatcaatggcgtataatcatagggatcacgagcattaacattgacgccctcggtgattttctcctggcagactttcagatcgccctgacggcatgcgctgcatagttcacagaatggcgcactgagatctaaagggttatcatccttaatagtgccctccttaatcaattccttctcattgactaagctgatctctagctggtccttccgcagcacagttggctcatccatcatgcagattgccaggaacaacaggtcgaagtgggatgaggccgagggcaaactgcaacggcgggggcggaaactggcttatcgataagaatcacgtgattgtacaactgtgaagtctgagattaagggggtgtcctatattgtagagatatttggaagagtaagtagtgactagaatggttaaagtatgaatcaatgtatatacatagatatagatattcaagtatacatcacaacaagaactgtaataatcataattggttaaacaccattcgcctccttccgaccgtttgatcgacctcccctaccgcctgctgggttggggaaagcgccataatcaccgttgcatagcaacgatcccccaaacacccgtcttcaaagctccaattcatattgccttgactcttcctcaaatcttcaactctacagctagacttttttttactaacacaggatcttgttttataccgttcatgcatcattgaccctcattcttctgtttcgccttcacctcaacgtcctaaaccaactctacagcaatctatagccatggcgattgctttggctgaggccgataagtatgagatattggacaaaattggtaagttctacctttttgtgacctaatttgtatcctacgtgctcaaaactaatctcatattcattcaggttgcggttccttcggaatcattcgcaaagtcaagcggaagtcagatggatttgtaagtgtgcatagttggcgtgttgcaaccagaactaacctcaaattgctcctatagattctttgccgcaaggaaatcaactacatcaaaatgtctcagaaagaacgcgaacaactcactgccgagttcaacattttgagttcccttcgtcacccaaacatcgtcgcatactaccaccgggaacatctcaaggccagccaggatctgtacctttacatggaatattgtggtggcggagatctaggcatggtcatcaagaacttgaagaaggccaacaaatacgccgaagaggagtttgtctggcgcattctctcccagcttgtcactgctttattccggtgtcactacggatctgatcccgccgaggtcggatcaaatattctgggcccggctcccaagccatctggactcaagggaaaacaggggcaagtcactattttacatcgcgacctgaagccggagaacatcttcctcggtagcgacaacaccgtcaagcttggagatttcggcttgtccaaacaaatgcaatcccacgacttcgcatcgacttatgttggcacacctttctacatgtcaccggaaatctgcgcagctgaaaaatacaccctgcgctccgacatttgggcggtcggctgcatcatgtacgagctgtgccagaaggaaccccctttcaacgctcgtacccacatccaactagttcaaaaaattcgcgagggaaagttcgcccccttgcctgattactattccccagagctcaagaacgttattggaagctgtctgcgggtcaatcccgatcaccgccctgacacatctgctctgattcaccttcctatcattcgcttgatgcgcaaggagaaagaggttgttgacctcggaaagaccctgcgccgacgtgaggaggttgctgtccataaagtccgtgaaatggaacagaacctcgccaagagagaatcagaaaagcaacacatcaaggctgaaatcgaaaatacggttcgacgagagtgggaggtcaaagcacgcttagaaatcgatcgccaggtgcaaagcgaacttgacagactccgcaagcgatttgagtctgaagtgcaagaaagggtcgccattgaggttaagaagtacaagcacaacacctccaatagcaatacctcccgggacgatgtgtttcgcacgagtaccaatggctctgggtcctctcgatccagcaatcaaggttggcggtcttctcggtcttctgccaacacgacagacgacagcgatactaccccctcatcaaacgccgacatcagccagctatctcttggctctcctccatcaaatacccgaaagcagcccaagaaggagacgcgaacacctttttgtcggtccaagaccgttgttgattcaccggtggatgttcaaatggccgagccgtcacctatttcaatcgcttcgctttccctatcccctcgccgcacttccgcccaaggaggcgctcgcaacatctttgcagaggccgagcggaccaaggctaagtgggagcccaccctagcctattctgatgatgatgacgacacccccgacttgccctcaccaactcggcctaaggtgaagcccgacccattgaaggcgccacgacgacctctacttcgccagaacaccgcggctctcatgcagaaacttagcacgcaaccttctctcttcccttccggcggtacccgtcttcctcaatcgacgagtgcatctgcttcccagtctgaggagcgcagtgtaagtgagagcagggctaggtctccccaccgccgtctaactaaaatcccatcatctgccaacctcgctgccgatgcgggtacctcaccaacccgcaagagtgcatcgaagcagcaacctccttctactaagaacgggggtggtggcgaagagatgttcaaggctgttatgcaacgcaacatgggtggccgtaccctcgtcgaactcgcacaggcgagagctggaggccgtccgatggatgaagtcaagcgttgtgccagtgactcgcgcgctggcggccccaccatgagcgtgaaatgctctgaacgtgatgctcctgctatctggaaccctgaactggatgagatgcccagtcccttccttgcccgtggcaggaaagttatccgcaacctgcggtagtcttttacttacattaaatctcctttacatttacactgttctttcggtttggttctggtttcggctctcttatgacgccttggggtattggagttttttttggattgaaggtttttctttcttggatttggatttcgatggtttggtttctttgctttggtttctttggtttctttggaagcccctttttgcccaccgttttcggttttcgcacttcgcttcttgcgcatactttcccattatgtcacggagttggcactaatgttttcggagcatccttgccatgcaaggcacggagtttgatacatatgcccatgtctctttgcattcgttggctacacacttgcctccccgactcgactctttaccacttttcttttgttgtttatgccgtcatgcccctttccttcaaaaaaggagacgattgagttctcttgtacatttattgcgttagccatgcatcgactgtcgaatttctgtacttgtttcctgtttctctgaacgtctcatctattactcgtggtgtcctcctccttcgcacacatgttgcttagtggttatattggactaatatttgctatgcctcccactcgggagtacttcacctaattcttcttcggaaagattacatattccgggttctggtgctttcgatgcttcaatgggggatgtacatatccatttcagaagaagtaaacatgtttcgtgtcattccagacttataacagccccgcagaagtttatgctgacttcctaaatgtgggagtcgagtcatccatctacagcgttagccctaccctaatatgcatcaccagtacactttaccactctttcaaactactagatgcatagaataggtaaatctgcacatctgattgaaatctgcaacataatacgtgaatgatgttcaatgaaacattttgaccaaaagatcagattaagcccacgcctcctcatcttcgatctcttctatctgaacagacttactctcctggttaagacgccgctcctcttcttctaacgccaacatccaatcctcctgtggtgaatcgccagcttgtgcttccggaacggggccggcatgatacccagccttctcaagcttgtccaactcttcaggttctaacaacttcccctgtcccttgattgactgctgtttcattctgaccgcagccggaacaaacttcctagttgcctcttgtcgcaggtcccgaatctgaggcttcgcttcgtaaacggtccttgctgctggaaccgccgttggacgagatggcagtgggtgaggaccactacgctcaacgttctgttctgaaggcacatttccatcccatctgcgctggtgctggcgtgggattggtggcggtgtatcccgcggcatgggtatccttcgcacgtcctcatccgtatcgctggtgtcactatcacgaggcattcgtgtttcatttgagcctcgccttctcttcccaagcacgccgtcaccaccaccccgtctagaactatcaccctggcggcctcctctgccgccgtgatcgaactggggtgccttgtcgccaagagcttcgcgcgccttcaaaacgccccgcaaatccttttctagcgcttcgagaagctccttatcgcgcggccgtagtttttgccctgattcctcggcttctttgaagctgttgatctgacgttgaattcgatctgggttgcggcgcgcaagtttctcgtttcggcgggctagtgcctctgatttgcctttcttcaactctttttgtttatcctgtttccgttgcgctgcggcagggttgatcgagcgctctttgtctttggccatgacgtcgtgttggtgttggtgtgtgagtggtctgtaattatcggtatggcgtaagctagctgcgcaagcgggtaataaatgccacggactcttggcgaatcaattgaagagatcgcagattaggtaccggcacaaacgtctgggctctgtggggtgtcgcacgtgaagggtatagttggaaacaagaatgcagggcgcagactagaaaagaaagcgcgcaatgaggatggccagtgtgtctatcccgcagaataacaggcgatcagtgcgttaggtcgcctcgtctagatcgatcgcgtcgggccgtcaggtcgatagtccgagactacaggtgggtgatgctcacaggccgaatgtaagaaaggctacgaacaagcggtgtgtcaaataaaatcaccagttttagcttcacggtttgagcagctaaggttggctgtgatagtagcggctgagtaaagaagttaaagttgaagttgggacttggtcaagtaccagtcctagataattttggcagaaatccaacatgcacagcggaaaagaaagcggtgtattttaggaccaatcatggaagttaaatctcatctggtcgctgtggttctccgtagagaaactaaagagtggagagagagagctaccatggttcagcattattgaactacgactacatacattgtacatacatcgtacattttacatctatgttgatttatatataatcaatgttatcattgcatatatagagatgtatatcattgcccattgctctcgattctcttatattcctggtgggcattaatgtacggagtagagcctcttgaaacttccatctcaatgagataggtgcagagcctatgcaatattcaatatcaaagaaaaaaaaaacatcgaagaagtacttgaggatgaaacaaaagaaaactctgaaaatatcaatacaataaatacataggctgctaaaaattactttttcttgatgttcgttccatctccaagcccctctttatggggaagtccgaggtatcatatttccgcctgagcctgtgctccaaaacatgcatatgtataaaagagaaatctcactagtctcttcgtcgggagtgtaactggcttccctcgagccgcgcgctgtctgttgagttgccgccaaccttccagcggctcacaccttctttctccgcctctctttttcctttttgatttctcctcataggagaaaaaagaagcttctctcccctcctcagccgtcaatagtcgcattccccggcctgactgcagtatatcgcaaactctcctctttacactctccatcctccatcatgacctgtggtccgtttggtctcacatcgagtttgatcggcgcctcgtagactgtcgcggtcggagcatgtctctgccgggaccaaatgtccgtctcagcctcgattcccgacacttcgcttggtctcacctcctccgagatccagatcctccgacaacagcagcagattgccttgcagggcggccatgccggcaatggggtggccaggggaagaggcactggaaggaccagcaattccagctcgcgcgcaaccagcgctgccagcagccagggtcgcttgctgctagaccctatgagcctccgcgcactatcgcaccagctggatggattgcaggcgcagatcagtcaccggatcgaatatgtatgtttcctcctcggtccttgaccgcatgtccatatcatcgggaaatcacatttcgttgttttaacataggacatccttgctagctcgaggatcaaatgcagcgctccatccaaaacacctacgaccgcgcgggaaacgtcattcgaaatgccgatgcggaaattgcccgcacccgtgaaatcttggcctctatcgacgagttagacaatgagctagcgaagatcgcccatatccgtgatattgtcaagtcattccgtggccggatcgagaatctagatcaccgcattgatcagagttctcggcgccgacgataatgccttcccataaacactctctccaaatacttccttcaaccccacctatcttgaagcgctccgaaagaccatgtacggtcctgcgctccgcacaactcacttttactcgaccactggatggtccgaccgatacacacctatattttcttcacacaagtatccgaaccagaacacatcaaagccgacagaacaagaaacaacagactatatatcgaatgtgtcctcatgaaccctttttttaatgcgcgtcaatcaccgtattcatatatatgtcacatttcattactctgggtatctgcttgatgaaacaattggctgaaagaactgcatgcctatgttgtagagacaccagtgttgagcaggcgacctcgaacggactgcagtatcttcatgactgcttgagctgcgtcgatgacggccatgagaactcggttcccacccggtgggaatccatgagatctgatgactatcatgaagggttttgaatgtgatttaaagcgcataagcacaacttgtcttatgcgtctccttgtttgatttgatgcttctgctatttcccctgttgcttcgattcccctctctgcatgttgcgtgtacattgctccgggttttctttttctgcgttgaggttggcccatgtccattgctaggatgattatagcttggcttgtggtgttctgcaatataattgggaacagtttcttcaaaacgattgaatcgtacgtcgctctgcgttgagtcctccaaggttgacatggacattgaaatgtcagggtctcgatttgaatagcaagcaggtcgtcggtgcagtcgctagagatatattgaggctactcaagggggttgagacttcttccggcgatgatggtggaaatcattgccctggtttgatggacatccctggcgatcgtagctgagatctcattgtaaaagccgacacaaagcaagttcgatgggctcctgcagagcgccttgatcatgtagttgatatagcaaaagggagcgcgctggcctgctgacacgcacaccttgaaagtgtggccgcattggtttcgggttttgtaggacagggtgtaagattcaatacattaaagtggcccacgcgttgaccccccacgcgtagtcactggatttggcgagtgctattcacgttattcagacaccgcagcatccaacattggcacattctgttcacataattcgactgctgctccttgcgacgacgcggaggtatctactttttgtgaattcacatcgcgtagcaaggccgagtccttctcctggcggcgttcaacgagctttttcccacgtttctccgtctgagggaatcgtttttctgtcccgcacaagaggcaccggacgaccagtacatcggcccatggcttcttgccgccacgacttgcgtttctgatttcatgcgagcaagtcacctccggcgtcaatattgtatcacagcgcttgcaaaccgatctcttcagtgtgaccggcaaccgaatctgcgtcttcattgccacggcgcgtagatgtgatacacatacccttgagaggtttcccaatagctcttgttgttgagtatctaatgtgtggccattatcccctgagtcaacatgaccagcaacagaggtgtgttcattgttgtggactttgacgttctgacccttggcgagtgtagatttgctctggaaatatgcggcggcttggtgtaggtaatccagccgtgctcgaatatggctctgagtgttcttgaaattcttgacttccttctttcccttggctttagccattctcgaacattcaacagagcaacaagtggatctcaaaattgtgtgctgcaacctgcacttcgagaagagcttcccatcgacgctagacccaaagcggtgaggctgaataaccacgtgatgctcccttggtgaggtcttcgtcctaccgccttatgacttcttcccctacacctttgtctatcgagacctgccacattcccgcggtccatacgtcttctccttattacctttgtctactttcacttcaaccacacgtcatctctcactcgcaatactttttcctcttcttatcaaaactcgcctacttacgtcgccatgtctcacgaggaagatcttatcgactactctgatgaggagcttcagaccaccacagcaccggccaccactgctgcgcctgccgccacgaatggcgatgccgacaagcagggcgacttgactgtaaccggcggccgtcccgacaagaagggcagctatgtcggtattcactctaccggtttccgcgacttcctgctgaagggtgaacttctgcgcgccatcaccgactgcggcttcgaacatccatcggagggttagtctaactcattattcccacaagcgttcctccatttgtccaatctccaacgtccgtccatcctcgcgggaggaatcttctgtcggtatttggcaatcagtcgtgtttcgaatctgcaggcgacatgaggattattgctcctgaaaaaggacaatatgtctttacaatatatatacgtttggtcctgtggcgctcttgcgctaagcctgagcctatgttcccaactctcacgtacttcgtggagattggcgcacgcggtggaagactgtgatatttatcacgtttgcctccttgtgaggcgcacctcatgttgtctgcagaatatgataggatgtgcacaaaaagcctggcttttaagtgttacatatagtcatggtggtttgatcaagcggcggaagatgaccgcctgcatcaatttgatgttgtcgggggatggacggacattgcgagacgactatttttttttgcttcttctttcgtcgaacccaatctaacatcggctccgccttccaacagtccagcaagtttgcattccgacttccattttgaacgtcgatgttctttgccaggccaagtccggtctcggtaagaccgcagtcttcgttctcaccacccttcaccaattggagcccgttcctggcgagtgccagatcctggtcatgtgccatacccgtgaactcgcttatcagatcaagaacgagtacgcccgtttctctaagtacttgcccgacgttaagactgcggtgttctacggtggtaccccgatccagaaagatgtcgaaatcttgtccaacaaggaaacctaccccaacattgtggtcgccactcccggtcgtctgaatgcgctggtccgtgacaagaaattgtccctgcgcaacgtgaaggcctttgttctcgacgagtgtgacaagatgcttgaccagattggtatgtgcatgcgatatacgacttgactatcacatcttactaacattcttccccagacatgcgccgtgatgtccaggaaatcttccgtgcaacccccgccgacaagcaggtcatgatgttcagtgccaccctttcccaggagattcgtcccatctgcaagaagttcatgcgcaacccgctggaggtctatgtcgatgatgataccaagctcaccctccatggcttgcaacagtactacatcaagcttgacgagaaggagaagaatcgcaagctgaatgagcttttggacaacctcgagttcaaccaggtcatcatcttcgtcaagagcacccagcgtgccaacgagctggacaagctgttgcgcgagtgcaacttccccagtatcgcagtccactctggtgttagccaggaggagcggtaagttcatccgagttcggcattggctgcagcaatttgctgacctccatctagtatcaagcgctacaaggagttcaaggagttcaacaagcgcatctgtgttgccactgatgtcttcggccgtggtattgatatcgagcgcatcaacctcgccatcaactacgatctccccgccgacgctgactcttacctgcaccgtgttggtcgtgccggtcgcttcggtaccaagggtctttctatctccttcgtcagcagtgaggaggacgagaaggtcctgaaggagattgagaagcgctttgaggttgcccttccgtaagtttctccaattccaaactaaaatgctttttggcaaaaggctaattatatccacagcgagtaccccgaggcaggtgttgactccaccacctacatggcttaggcatgtctcggtaaaaactttgttgatttgaaatttcttttcctctttccaattgttatggcgcactagctcgggttttgatatgtttttctccgccgttgggcgctgcctctgccccccaccccttgtggctttgaagtgaggcataacccttccatgtatccgagaacagcaatggaagcaagaatgggttagctctgcacgactgtttaaccgtatcctggccgtatcctgacgggaattctgggatcacaatgtggagttgcgatgtcatagttatcgacgtctgcaagacaagtcaaagccgaagacaatcagatagaaatatgcgccgccctgcggtcgtgattccgaccagacgacccgaagaccctgctaagtttccgatcgagccggagtggatatagacaccagaattcaatatctcaactatgttcctcgtggtttgcccttaactgtcggaaccggtccacccataactctagggcgcaataattagcctccactataccatgtatctagaagctggatgtatgtagtcggtggttgcagttccaatctgacttaaagagcttcgtagcagctttggtcatcctttacccgatccttgtatgagcgatgtgattttgactgattcgacgcatcatactgatctgagcgagatatgtgtgctgtttaggatatctaccactcaaagtcaatacagcgagggtattcaatgctgcgacatatcagtatcttctggtcaaaattagaaaataaagagttcctgcatgctatcatgacaactgtcgagttgaacacacggcgaagaaattgggacattcgtgagtcgagtagcaagatacatataactaatatgaatgtagatagatcttagtagaattggcaaaactcgagattttctacatggaagtactcagtgctttgtatatatctctgcgagttagaagtaaacatacggttgaccgtccaacacagaaagtatcaagcataaccaaagcccatgacctggaatataatacagttacataatgcattaccctgtttgaggcgaaaatcaaagtgaaaacacgaaaaatggcttagcccaaagcactagcagctggaaaggcatcgggtagcgtatcaggaaaataaggcagagacatcaaaccctgtcccgaattttcaggtaaatggccgtcggccctctcacttcagcgtcggctgtttgtgagtgcagagtctgcgttcgcgtgatttgaatccgtaactaagcagatataatatagaaatgattgtactctgtactattacttagatcaagaccacgttgcgtaatacataataatttagctggcctcaatggattgacaatgcaaatcactgaatctgcaatgcatcaaggactgacgtgcccggaagtgcaaggaagagtcgggatggcatcaccgcatccgcgtctccgagcccggttcaaacacaacaaatgccatggcgtgatcaattccgtcagctcactacagagccctggagctccgagggaaatatctatgggccctacaacgtacggagtactcggtatgttgtacggagtactctatagttaagtaccagctaatactaagatactagtgattccaacacgttatataaagtagctctacatcgtctcctttccctaggatcattatggttaatatgcttgattaacggctacccccggggggggggggggggggttannnnnnnnnnnnnnnnnnnnnnnnnnnnnnnnnnnnnnnnnnnnnnnnnnnnnnnnnnnnnnnnnnnnnnnnnnnnnnnnnnnnnnnnnnnnnnnnnnnnnnnnnnnnnnnnnnnnnnnnnnnnnnnnnnnnnnnnnnnnnnnnnnnnnnnnnnnnnnnnnnnnnnnnnnnnnnnnnnnnnnnnnnnnnnnnnnnnnnnnnnnnnnnnnnnnnnnnnnnnnnnnnnnnnnnnnnnnnnnnnnnnnnnnnnnnnnnnnnnnnnnnnnnnnnnnnnnnnnnnnnnnnnnnnnnnccggggggggggggttggtatacgaagacaaatatttaggtttaaaaggacccgattgggtaaaaagggtactaaaccagctgctaagaagctatttttaattatctgcgatttaaaagttttaattcgtgcagaggggtatgctttgaggaagtcatctttattaatatggttgatcccagcctgtattttcattttaatcaaccggctgtacgaccgctttactaccgcaaaataaccgatattaagtggttataaaaggtgagataaatgcagtggtatataaattagtataatttcattttacttataaatcttatcgaattttagggttaaatggcttccgtgaccattgagtactagaagccgataccgatcctttaaccgcggaaaagtcgatagaataaagagcttttaaagctagcgaagtctaattttattagaagtccagccatttagactaactttaaaacgccagtcatttggaaggttattaaaccaagattctatatagaccttacctttgaaaataatatacagaaggagggcctaccccgccgcgtttatatattcaattgcagttacccactcgcaatttctgggttataaaagtgatctctgaccgtagtattcacttctagtaataacctttgccgttacggttaaacctattgcaaaaccggtctcgtcgaagttataaatattatctaggtcaattctaaattaaataatggttttttgaataagattaaaccattctccaataattttcgggtcttcatattttacacgttcgtaattatagtatcttgagaatcgggaggaaagaagaggataccatttaataaattctgtaacccagtttttaccaactgaaagagccggggtagatccacgttatttgaggagaagattcgccatttctcggaccatagaaggccggggggcccctccacgagaatctatagagattatccatttctcaagcgattcttcctcagtttctgtcaatttatgaccattggcgcgagtttcggcgcgaaaggggcccaatggactctcgcgtcatactacgatattggtcacggatgtgtcggccttgaggccctccgaagtagacggtcaactccttgggatcattccgcacgatgtcggtaatgcggaagccatagttatcggagaagtaggcatcagcataatcccagacctgctgtgccgctttgctttgggtatagagctgcatacccatgcccttttgttgactaccctgaccagtgaaaaggaatgccgtctcctcaggttcgatctcagcttctccacgcagaacggtctcgccgcgcccgacgtgctttgcctccactgagacgatcttgcgtcccgccaacatgccgatgtgctggaagacgacttcaatcttatctcccggtagcaccatactcgtgaatgagcagtggaagctacggaaggcgccgatggttgaggcacaggtgtagtgttcgacaagtccacgtacccgtgccgaggtgtacatgctgtgcgtgatcagacctggtagatctgcatatcgcgacagcgacgcggacacatggatgggattgaagtcccaggagacgtgagcataagcctcgttagagtgtggcatagtgagaatcaaagattcgccatcgttagtcaagggactaggctgatcaaacatagcgcgcttctgcactggactaccatgacgcttgaggtaatccatgacagggctacctcggcaggtgactgcgtgatagtctacggtcgcaatcggccgcgaaccacctgggagcgatgaattcacgcgaacttcaccaacagtagtaacggtcttgaaggtgtccttgctggcgtattggtaggtcgaacgaagtacgaagaccaaagtctggttttccaggtcgagcgaccgatccaggggctggaaccaggacttcgagttcaagatcgcaacctccatcgggctacgggggcagagctccatctcttcctcgtccactttgcggaacatattctcccagtctgtgtggtggcctcggtagaggaattgactgcttaactcgagcacgaccttattctcatggtacacatccgcacgtacctcgaccaatttacctgtctcctcgatcgtaatggcttgtatacgagacttggtctcaagtgcataacctgcctgaatggggtccgcatctgcgggaatgcggaagccattggtgagatgcaccagcgtcaacagatcgacgtcaagctcccgcgagaaaagcggcttcatcaaagcttcccagccaatgacgacaccaaagtccaacggtgccgccatccgtttgccacgccgcttgctagcggcatcgctggcattctgtacacaatgggagaactcggcgattgagtcggccgtcacctcaaactgcgattcgcggaaggtgtcgtggaccgagggccatgtctctggtggttcacccgcgaaccagactctatagtagaagtctttgacacgctggttgcggccttccataatttcatggatgggagcgtaaacagcctcacgcctgaactggaacttcaactgcagcccaatagcggcacctccagcattacggtagttgatgatctcaagcgtgataacgctaggctcatccactcgcacctccacgaccttgaccggctcagagtgtggccgatgttcgaacagcgtgattatcggatctgccgaaaggcctccgtggccctgctgcaccatcacgtatgattcacgcgtgggctggaaaagccgccgcagcggattctcgcagatggctcggccctgcacgatcgtcgctgcgtggaagaatgcttggcgccagcctccattggaaccgcccaaggccacaagccattctgctaacgagggtgttggtggcgcaccgggcgcaccgtccagtggtttcacttcatataacatcgcgcctgtgtttccgacgggcgagcaatgaatgcccagctccgcaagtcgccagtcctgtgggacagagtatgggctgaagcagtcgacaatagggataccatcctgctggtattcgggatcttgctgctgcaggcactcaatgtgtccatggtagatgttgcctaaaatgtcgcctgccggctcgtccaccttagttgaatatcgcgccgccactgggccgtacccggccgacatcagcgtcagcaacagctgcaagatcctctgactgccacagcgagtcttttttgaagtaagtctcgaagttttcgtcgaggacagggacaaacggtactggctttgtgccgcgtctctggcatagaagcaaaaagtattccgcatcttgcgtgccaataagctgggcctcagcggtcggcaaccgcttcaagatggcgttcagcgctgttgtcggatcagcaagagcctcgtcgccgttgacttcgctgagtccggggccgggggctacgtcgccaatgcgggcatccacgcgctttaggaaatcttgcaggaacaagcggtaggaatcatcgatccagcggccctcagccgacacataggtaagcgcaataaaacggcgcagaacctcggcgtaagtcatctcctccaagtcgataacagatccctggacatcgcacccaaaccagaccttcaccgaatcggtattcagtcgctgaatcaggtagtcacggtgtttctgcagatacgcgacgcgcttactacgatcaaggctgaagacattgcgatctaactcagcccatagttgcacaccccgcgtagccagcttatgaataggttcccccatctctgaggttacagtcataatgccgccagctggttgtgtgtatgtctgctcccaatcaccttcatcctcgactcctggcgcattcacaattgcctgtttcacagctgggctggtatgcgcttctttggcggtcatcaaacgactgccgagaaggataccatcgaagggcatgggcgggcggttataccgacaggcccaatcacctgttaggtaggggaatgtgtcctgtgcaccgccaaagccactgcccgctacaagaataacgttctcgcagcggcggatggagtcgtaggcttgcaagatcggttggtggaagtcctcgaatgagtggtggccaccacctcgcccacctgtccattggagtagaatagggaaggtgggatgagccgatgcgatgtcgaggacttggtatatcgcgggtaaagtgccaggcttgaagcccatgtggcgtagaccgagctcgttgatgtaccgagtggccacctcgagtgaaggcacgcctgcgccgatagtgagtccctccaggggaacgccggccgcgcgtaatttggccagcagcggaatctgccacttcaccgcgtgaggagcggcgtagatcatgttgcaggtgatgccccggccagcaggtaccgcgtccagcagcttgtaaacgtctgtctccaactgggcggcttgatggaatccgcccagtgccaattcgacatgatagccggcgcgcataactgccgcacagaaatcccaggctgcagttgtgggcgtcattccggccaccatgactggtggcaagcccaagaggcgactgagcttagtatcgacaagcacgccgccgccggcaatctgtaccaactgcggtcggtagcgattccgccatataggtccgtagacgagacccttgggcgcaggattccagttaaagaactcactgcgatctcccagctcggtgcgggagctggagatgcccgtggccaggatagtacggacgccagtaccctccttgagtcgattagtgagagttccaatgccagatgcaccatcaggcccaaaagcaagaatatgcgtggatccgggaaaatgcacggcccgtggccagacgacttgctgggtcgttatcatcgcaatgagcttgggaatcaagttgacggctccacacttgcgtagatctgtccctgtgtgggtgcaaaagacagggattcggagttggtcaccggttatggtgaaatccgcgacacgctccagcacgcccggagcgacatctgttagatagctgctgtggaaggccgtggttattggaaggaatctggtatggatctcaggctttcgctggctgaaaggaatccgatgttgcaagccctttgccggagctttcacctgtcgtagccaaacattaaacccatgaagtgacagtggcggtccagccaaaacggcattggtaggcccgttgattagagctatctcaatgcgggcatcaacgggcaaatacccattgacggaagctacataggtgcggagctgggagattggacagtctgccacactcagcatgggtcctggaaagccctcgccgttggcttcggcgtctgcgacaacagccggcggcagctggcccacggcaaattggtcctggctggcagttccgatggcgagcagcaaccgaagcgcatcgagcgcgagcgcgtcgaattgcgtccatgattgtgccactacaatcacagtggctgggatgatgccttgagaatgtcccgtggctccagcaagcgcggtctgaagctgggcaggtgtggtacccactatgcgtccgacgactcgataccaggccagctgcaacaaaccgatgagcggcatactgatagacgcaccgattaggtagtcagatggtggcgtacgatccgggttctcgagccaggtgactatgtccatgccgttgtgatagaatcgactaatgctctcctcacgggtctcgcgctgcagcatactcgagactgacggaatgaggtcttccaccagcgggcgataggtctgccagagcatccgcagctcttcaaagtaatcttcatcattgccctgcccgccgaacacagcatatagtcgtgctttgcgttgctgcgcggcagccaggagcgcagaaggtgccgctggtcgactgactttgcgcagaacatggcgcgcacgtacgtaagcagctaaaatggccgactcggcgtctgcggagatgtccaaggcatagactacaccatggatctcgcgctgcagtagaatatcacgatcgaaggtatcgagggcgatggtcaaaagatgtcggagatcgtcagccaatccatgaggagattgctctaaacgacgcacggtaaaaccaataaagcgggctcaaagctccaccagagaggatatcggctcggccccaccagcggtttgaagatcatggagaaagtcatcgcgcagctgaagcgcagcggggaatgaggcagtagaaatggagagggtatgtgtgaaacggccatctgtgatggtgaggatttggctgccccaaatgttgctgggcgacgacgaggtggatagttcatcaggcgttgaccagttcgaggaagtcgaagccgacaagacagccgacggccccggcaattcggtcgagatcaacatgacagagaaaaaattgagccgcctaggctaggcgtcaacatatttttttccccatcgcgaacgccagaccctgccgtatattcttcatttctttgtctctttttctctttgtctaagcatcgtcgttgacggtggggcgcaatcgtgacgggtgggtcttgtgagatgttgagccctaagcgtctcaccgtgcagcattcccaaggttgccgccaatctgacacaccaaaatagcccggcctctatacgaggctagaggcgcttggggggccagaaatgcgtcggaccaatgccgatcaggcagccgttctaaaggccaaaacccgacggctgatcgactgtgagatttaattcaatttaagaatgtcgcccgtcagcaccttgtgacttttctccgctcgtctgttctgttgttcttctatcactgtctttgatctctgagtgctgttacactcttgttggccgttattatgggttggccaactcattgtggtatgttcttcttctattaatcttctgggccttgactgatcttgatagatttgtccagcgaggacgctcaatatgcctactgcgccaatgggcccgccgctgtcttcttcacagttatattcggactcacctggatcgctcatttcgctcaagcggtcatgtaccggaagaagttctgctgggtgattgtagtgggcacagtgtggcaatgcatcggaatgattatgcgcacctactcgaccatcgatcaaaccaagtcgacgaccacggccgccggacagctgttgattcttctgacgcccttatgggtgaacgcctttgtgtacatgatcttcggccgcatggtctactacttcttaccagagaagaaggtggcaggcattcgggccgaaagactggcccaaatcttcatctggcttgatgtgaggtgagtttcgccccgaaaggcggccctgggtcaactgtccaggacactcttcttgtgtaatgaaactagctgactctgatctgacagctctttcattgttcaagcaactggtggtatcatggactcggactttagcaccgagatgaacaaaatcggactgcacatctacacagccggcattgcagcgcaacagttcttcatcctgtgcttctgcggactactattcgcctttcaccgtcggatgcaagagcgtggtagcatttctcgtggcggtggctggcgcccattggtgatagccatgtgggccactttgacattcatcacggtaggtcacctttccaggaccattagttacagacgactaatgcatattagattcgaatcatctaccgtctgattgaatttgccgataccgacaaggccgggacaagccccttgacccttcacgaggcacccttttactgcctggaattactgcccatgctctccgccatggtcatctggaacatctggcaccctggccgttatctccaaggagatgactgtgactttcccaagaaagtaaagctgtctcgcaatgaaaagaagatgataaagcaagaagccaaagatagcaagcgccggggtcatcgtcgctcgtctagtcgtaagggtgcacgtgtttctgagtctcacccggcgaattcgttcgacgaaggggctctggagtcgcagggttatccattgcgaggacatagataatcagctacatatcaagtagggagtgcatacagagagagtttttcagacatgatcagcaaagtgcctattgtaattccaagcattcagatttactttcaacagttacttgtgtcacaaacactcgaacatgtatcaatgccggatttcaaatactatctgcattatcttacaagttgttcaatctaagtctgtcgagaacggacattcacactggcaagagagaggtataagtactaacagttagagggacattctatagggtagtcctggaagatcagtagcaaaacctatcctccgtggccgcacgaatcataagcttaatcaggcaaatggaaaatctaatatgatgtgaccggagttttgttggaactcttgtgtgtaaatagaaacagagagtatcccgctcacctgggcaggcttaacctgccactagacccaggaaagaatgcaagaacaaagaagagacacctgggtacgctagccccgtcccagaggcaaatgaaccgaagatgcagagaaaccagaaaattgaagatgataatatatcccaaacccattcttatttatagaacagcacctatatgcaagcatcataaaccctcgtctgcccctcaaaatctgaaatatccaactgcaccccagcatgaaccaacatctcaactagttcttgctggttcgactcacaagccatatgcagcgcggtacgtccccaccaatcctgatcattcacagcacgggctgaatgctcaattaggacgcgcacaacccccggctgctgagcctgtacggcgatatggagtgctgtctcaccctttcgggtaacccagctgattaggtctcgaggtggggagctagatagtagcagtcgcactacacctgcgtgaccttgttgcgcggctgaatgtaggggcgtgaagcccgtgctgtcgggtagggcgggatcggcaccggcctgtagtagtactgctaatacggactcgtgaccgtatagtgctgcgcgatgtaatgctgtgtgtccatgtgctccatcaggtcctcttgtagtggagctgccggtgctctctggggttccgcggggggtgtgtagaaatggcggtgcgggtgttgagcaaagaaggtctgtgtcgattgaggtttggaagggatgggcttgattcttgggcgaggtcgagagcgaatcggagccagagcccatggtcttcaaattgaagatttgatgtgtatcctcatccagcgattgtgcccaggggcttccggtgaggccaacttgatccagttgcgaggtgtatgaatgtagatcggacggcagttgtagggggtcctgctgttgtatatgatggtgaggatccgcatatggttgcgatggccattgccctgatgattgtggtcccacagcaggttgctgctgtggtgcccctggttgagaagattttgagtctagaggagaagacagcccaccggcggccgatctggcagtggctttagtctgtgtgctgttctgggatgtgggattctcgtcccccttgcgtaaccctaaaactcatcatcagctctgtgatctaccaagatcgtcccgctctatccaccgagtctcagtctcaattttgcaaccaaagacaattttcctactcactttttcgatatccacgttgagcaattcgattttgcgcccgacgacgctccactgggtcactgatattcgcccagttctcgcccagcactggggttctaatcacgaagatcatcgatttagcttaggcaactccaatccaatttggagtcagggggagggggggagacgaacgtgatcatgatgcatagaggctcacctagcatggctatgcaggcaacaagtaaaacaaccacaggcggggaccactcattcagatccacggtgtcacaaagcagtctcagtcatgatacgcattaattatccgcatggctctggtcttcatctccttttaaatcttgctgacgaggtggcagtcaagaaccaaccatcttaggtgctgttcgagcgcatccgcgaacggcggcagtcaccatcgaccgtacccactgataatgcgcacttgttgcgtacgcatttggatacggagtttccttgatcgtacggtctgggtacccaggggcataggtgccagggtcattttcggatttaatgcatgcaatggtgccttaatgccttaatttggactggcaaaatattaaaatacctgaattacaattacagaagcctatatacctgagtatcaggcctatagagcgatttctgctatacaactccatatgtcatatgattctcaggcggtttggacctgaactcagaggtaatagcgatctaatttattatatctcttaagagaaaataatatataacgtattcagtaaacgagctacgcaccccaaaacacatagtaaaagcgataaattacaacatgatattgcaacaacggtggtcaatataaactttatcttgtagcccatcactctccatatgatatctgatcactctagggagttttgagaaatttgatataatagtgatttgagatatatatatttcctatagttcagtgatgtaattttcaataccgcaatgatgcaactttctgatttatttgaaattgagatatattgctaaacatgcttatcgatggctatcgacaagtaatgaaagcaagttgagacgtggttgttgagatataaatgtggaatatgttgcatttactatggtgttttggggtgcgcagctcgtttaccgaatacgttatagattcagctgaataaaggtagataaggaggagagaaagaggaggagaagaaaaggaaaagagaagaaagaggggggaaggtatcacctcggcaacggatatttactcacgcgttagtcaaagggttcgtccggcgtactggttattccgtgctgaaagctttacaatacactgtatcctggggcctgaaagcggtcagtgttaaggctaacattaggccaaattaaggccaaattcaggtactaaggccacaatatactacattaaatccgaaagtaaccctggcacctatgcccctgggtagtctgggtatactccattgtaaaatattcagcaaaacccgtggaaaaatcctttgttcctggttgcacacgctaatgcagactaatggtctgagagtgttttcgtttgaccaatagccgaaatgcctcagcgatcgggctagcggcggggtttcctgcccaggtgccaatagggctgttaaaatcacttgaaatttaaaaatatcgtttcaatttcaatttcaacgctaaaatattatttcatttcaaaatcggtctatgcctcaggcatggacccactcttagtagtccaccaattagataccttaatttttcagagagccaataagattatcatagcttactctaagcctaattaggccgaatacaggctcttacctacaccgcctagtattcttcttagaccgcctacgcttatgtagcgctagtccgctagaccacgtagagtgcaatgtataggtcaaaaatatatctctggtaatctaggtaagaaaatgctccctatagcccctatatccggccaccccgtcctgcttcaggtactcttatacgaggccgaactatataccgataatatctaattatcctaccctatatctatagaagacttatagtcaaagagtcgctctgagtactactatcgctagtaccactatcgctagtactactatcgctaatactactattactagccctactaccgctagtaccacttcccttactactattagtactactagtaggactatagggactattattattattattactctagttatcactcttactatcttaatagtttagcgggtttataaagggactgtatcgctatacgtaagaactagcctctaaataatctatagggcagtgtatatagtagaatttccttccctatcgttacctaaagcaggtattacagctagcgatacctttaagttagtcatagaaccagcctactaaggtatagttacctctacagctaggcttaagtgtgaaatatagttaatactattacctcgaaatcactaggtatataattatattcttacctataacgattctactatattcccttcggcctatcgttagtagcttaaagtacctagtatagaaggtctagaaataccgatatatagtagataggttattatatactatactatatattatattgctatcgctaataataactaggtagatatcctagttaactttattctatttaagtattaggtttagcggtctattattagaagtaagggtaagcctaagctctctagataagactttaggtagatattatcctatacctaggtagagttagtaagtagctagcttctaacctaggttagggtcttatactaggcctatatatatttagtatatattaggaagatataaggtttttaacttactataggtatatccctatactagataagggtttatagtattctagactttatttaaagtaaatatataataggaatagctatcggtagactagaagactagaagggctactatttttataaagataagatatacttaaacttaaagactaagaaaattttagaggacttagaggatagagattctagagtagaaaggagagggtttataactattctattaataaagaagtattccttctacccttctaagggtatttaggaatatcgctttctattaccttcctaataaagaagaggtctatatagaattctttagttctttagttctttcttatatataatactaatattataaagatactcctataataagaatctccctttattactatctaaccgtttttagactattagttataagcgactgtactaggatatttttataaaggagagttagaataatattaataacttttctaataggttgatctctaggtttaggataaagtactttaggtatcttagcgcgaagatactttatagaatacttagaggatagagtagttagtattttttattttttccttatagcctaggtcctatagttaggtagctaactctacccctgattctattatagatctaggttaaatataacttctactctatatcctattctagaaatactatataaattattgactatctaaggggaaagtataagtaaatccctactaagatctgtataatctttattaaagaaacgaagaaaggtaaaatagcttaaggacctattagcttttaaggttagggtagctatagccttaggaaataaagggataatactctagctagatagctttactagtctagctggctatttttacttatagacgatctaggcttctaggaattctatttacttatagatagtacttataagctacctacttattaagctattagtaccgaactccttaataaatagtttattagcctttagaataaggttaatataagattaaagataatatagtatcttaatcttacctataataagtcgactaataaaagtagataccgaatctttaatatcttattcagttcttagtcctatagtatctattactatagagataagattaaggatataagtataataggggaggaagttattagcctagtctttaagaaggtataggagtacctaatctaagaaggtaataggttacctaattagttctatattaactctctagctatagatatatataaggtaataaatatctactactaactacttagagtataacctaagataagttatatattttatatcctatataacttatacagcctctagctccttctaaaggatatcctcctaagaagtaggattaagagtacgtttaagatagtattagagattatattattctttaactcagtactagacatcggcaaagcccacccggcccatagcccagcccagcccaacccccccaaaggccgggggtttgggtgaactnnnnnnnnnnnnnnnnnnnnnnnnnnnnnnnnnnnnnnnnnnnnnnnnnnnnnnnnnnnnnnnnnnnnnnnnnnnnnnnnnnnnnnnnnnnnnnnnnnnnnnnnnnnnnnnnnnnnnnnnnnnnnnnnnnnnnnnnnnnnnnnnnnnnnnnnnnnnnnnnnnnnnnnnnnnnnnnnnnnnnnnnnnnnnnnnnnnnnnnnnnnnnnnnnnnnnnnnnnnnnnnnnnnnnnnnnnnnnnnnnnnnnnnnnnnnnnnnnnnnnnnnnnnnnnnnnnnnnnnnnnnnnnnnnnnnnnnnnnnnnnnnnnnnnnnnnnnnnnnnnnnnnnnnnnnnnnnnnnnnnnnnnnnnnnnnnnnnnnnnnnnnnnnnnnnnnnnnnnnnnnnnnnnnnnnnnnnnnnnnnnnnnnnnnnnnnnnnnnnnnnnnnnnnnnnnnnnnnnnnnnnnnnnnnnnnnnnnnnnnnnnnnnnnnnnnnnnnnnnnnnnnnnnnnnnnnnnnnnnnnnnnnnnnnnnnnnnnnnnnnnnnnnnnnnnnnnnnnnnnnnnnnnnnnnnnnnnnnnnnnnnnnnnnnnnnnnnnnnnnnnnnnnnnnnnnnnnnnnnnnnnnnnnnnnnnnnnnnnnnnnnnnnnnnnnnnnnnnnnnnnnnnnnnnnnnnnnnnnnnnnnnnnnnnnnnnnnnnnnnnnnnnnnnnnnnnnnnnnnnnnnnnnnnnnnnnnnnnnnnnnnnnnnnnnnnnnnnnnnnnnnnnnnnnnnnnnnnnnnnnnnnnnnnnnnnnnnnnnnnnnnnnnnnnnnnnnnnnnnnnnnnnnnnnnnnnnnnnnnnnnnnnnnnnnnnnnnnnnnnnnnnnnnnnnnnnnnnnnnnnnnnnnnnnnnnnnnnnnnnnnnnnnnnnnnnnnnnnnnnnnnnnnnnnnnnnnnnnnnnnnnnnnnnnnnnnnnnnnnnnnnnnnnnnnnnnnnnnnnnnnnnnnnnnnnnnnnnnnnnnnnnnnnnnnnnnnnnnnnnnnnnnnnnnnnnnnnnnnnnnnnnnnnnnnnnnnnnnnnnnnnnnnnnnnnnnnnnnnnnnnnnnnnnnnnnnnnnnnnnnnnnnnnnnnnnnnnnnnnnnnnnnttgtacagagatcagacgaattggtaaggtgatctgggaatagcttcatttttaatatttatggatagatcattttttttagtatttgtgcgtagattagataaactagtcaggtgatctaggaatagcatcatttttggcatttatagatagatagattagatgaattggtaaggtaatcatgttttttaccagactaaaacaagtgataaaaacctataatttattaatcttatataatctgacttataagcgccaagacctatataaaatacaaaaatgggctaaaataggcccattatgggtttatgggcttagcccactgggctatgggctgggctgggcctaggggagctgggcccatagcccatatgggttgggctatgggctgaaatcttgggcccatgctgggctttgccgatgtctactcagtacctctataactaaatcgatttcagaaatattaggtcgaaatctactataagatatccgcgttcctagtatctataataatataatagggcttgtaatttaagatactctacttagttcttaaatactagtaggcccttaagtactaggcccttaatattaaaaaggacgataggggtagagggaaaaaagccttaattgcctctaccttattagaacctaccttttaggtagatctcgataagttaatctaactcctagagctaatctataaggcgtagcttatatctaaaagctaggtatccgatcttataaaggtaagtctattatatataaaatctatatataatatatacgaagtctatatataatatatataaagtatatataaaacctttatcagcctttattctaataaagataggttatttcttaatagattttaatctaggagtaccttaagacctatatattaatatcaaaattttaactaattatataggaatacctagaggataaaagcctaaatagatttaaatatcgatttaaccgataaattaagctaatctactagcttatattttatctttagctatcgatagctatctaagatccgtccttttccctagtactttaaaagctaataaatatacttatcttaaagtataggggagagcctactaaaaagtagttctagtaattttagaactaataatagcgttttttctatactaataatagtagtatctagtctaactaggacctagaggacttctagtataaggcgaaagtattcgctccttagcttactaatcttaccttatatagctataatactacagctaatttagttaccttagagcgggcattttctactataaactttatttactcgaaggtatacaattcgcttttacctaagaaggttaataagctagtctatctccggataaactatcgacttataagtaaagggcctatccagtagcctgacctagaaaaggcgtaggattagatagaccagtttaataaggagtagattattagaaatcgcttcttccaggatatgacttctcttaagcctcagactgaaagccttagtctaggaaataagctttctgactctaagtctactaataggggtaggtatattgtaataagtgtaaagcgtccttatgacttatataactaaaaatttactaccagtttttctgccttttttttctgcttatattacaaaatattactaatacattaccaatatattactagcgccttagcgtgaaacaattgaaattatattttaaatttcatgaaaattaaaaatataatttcaattcaagattttgaaattcaatttaacagccctaggtgccaatgctacctcctgttttcagagcaggttttgagttcgactccagaacccgcactgctccactggggagtggcttggtcaaaaggtacgagtacggagtaatccgtgtttagaccgacttcaacgccctacaacttccgtatgacaatcatgcgaccgagttcatctatatgattggatcatcatattagactgcccatcggtaatcggacaattgaggagcaagagcatcaagaaatcaattctgattcgtcatgttcgtaacagtcccttgtctttcatacaaataatcggggctagcatccatcgagacaagtacttccaaggtttggtcctcgggtaccaagctttcaggctaaccctccttttgtgatctttcctgatggggtatagtaggctagggtttacgaacaaaggatgctcactgtgcagcaggcctagaatattagtccccgacttctccactttgtacgttcggaagctgaccgacctgagttttatttagatgaaggctaccgttttgctggtagacaatttagcgcgttattgaacactttaattcaatttcggtttaatgccgatccacatcaatttacatagaagtatacagttctttacaccgattgaagataatcgtgatactaccggcaatgcgactttggatctgaggtcaggcgtccgaagtacagcaactaaatggagtgtcagcacttctgcagctgcagctgcatgcccttacactattgatgccttcccacatccctccgttcggggtttattgaaaaccaaagtggactataatcaaagggtcgatccaagtatcgacaagtgatgctcattcttctcaaacagaagtcagtcaagtcatcgaaatattgtaacttcacgcaagctctgctgctagtagagaagaagacagactgtcaaatacactttaaacccagttgaaatgtggaattgatcaattagaaatgtgcctatagatgaaaaggcgctgttttgtattattcgtagctctcagtgttataagtagtagagattgtgaatggggtgttttgtccgcagacagggtctcttcgatcggtacggagttgtgggtgtcctctctcaataaacgcgaggaatcaattgtccatgcatcatgtcggagcctatggtggattataactagccattccagagcgaccttgcacatcaggcagcaaaaatggaccaaacaggggcttaacgaatacaacaaaaatagacgagcggccttagcgccaatcgatactgatctgcctgctgcttctgcttagaacctttccaagtcaatgaaagccagaatgaggtagcctgaagctcttcatttatctaaaagcgcggttagttcgacttgtaaggttacattgattaaacaatcttaccgcaccaccgagtaattccgaaatgaagctcccctctctcgtcacagcgagtcaattgacttttcccctaacatttcaaactgcgttccacacaaccagcaatacagcctcgctgctttcagcacaatatggcacaacactcaacgtcgacgtgacgttcgccaatcagacattcaagcttctcgtcgatacaggcagcagcgacacctacgttgtcagaaatgacttcatttgcatcaatcaaacaaccaaccttgagatccctcaagcggactgccagcacgtctccccagggtacaacgaatcagacacctatcgtttgatccccaataaaatattcggcatacaatacggcaatggtatagcgagcggagtcatggcctacgaagacatcacattagccggtattactgtccccggacaagccgtcggaatcgtcggccacagcaatcccatgggcgacggcataaacagcggcgtgctaggcctcgcctatccctccctcacctccgcacatccaggagaccataccgacaatacaacattttggttcaatcgtgaatgctacagtcccttgttcaacaccatgtacgaacagggccttgtttcagaaccctacttcagcattgcgctcgcacacacgccgcgaaacctttctatgccaaccttcggcgggtacctcactttgggcgatctaccgccggtggcgtatgatccgaaatttgccagtgttcccgtagaaattttggaaaacattccgcccagtttcacctctggcaagcgcactcgatcatattgggcttttaccgtgtctgctgtgacatttggatccacaacaaaagtggatctcaccacgagcacgacctccataactaccaacagcatggagttccaggtatttacagataccgggaacgactacagctatctgcctgctgtggttgcggatcccatcaatgccttgttcaatccgccagctatctacaatgagacgctgggagttgctgtcgtcaactgtaatgcacagccaccgatgtttggagtacaaattggagaccagacattctatcacgatggacaggatctcatttatcagaccggtgatgggtactgtgtctcaagtttagtggcgtcggagcgtgtggcgtttgagggcatcatgttaaacattctgggtgtgccgtttttgaagaatgtggtgtccgtttacgatttcggtagaaatgagttgcgatttgcgcagaggtcggattaaaaactggggttggggtagtgctttatatatttagatgaaccagtatcgaatcacgattcatgaccttgtatttagtcaatttctcaactggatagggacattcgcatccagttcaattctagaattcatctcttattcaaacctctctttggcttgggcggatactttggtatgggcaatctcttgttcgtgtctcctgacccgctgctcctgcatgggattaaacagtaaagctgccggctacgagaatattatcgtgctcatcaacaagctgcagagcaagaaactagctccagcagcaaacatagacgcgtacgaaagctgggtcgttctggagatttcatcaatggccgccatttattcctcggtgctggcacagcggaggagctggataaccgcatcggtgattgcgttggggacttagccctcactagccgtggagaacaccgactgatcagtctatcaacgctcttgctttcacactaatattaagatcaaagtcgacatgagtctcatccagctgaagacaataacggccctctatccactgactctctccgcactgggagatttctttacgaccagtattcaacgccccagggatggtatagccggtaactccagctgattgtcaaacgctgggatcggccaaattgctatgatgcaagatcagcctggtcctaccgcgacagtctgcattcgatattaatcaaattcaatcgagctggacgattcagacactcagcatggtaggagccagtccttgccacaggaacctagatctcgataccatgacgaacattccggtgaagaaccactacggggatcggtccagttgaaaatttgaactcaagacttttgaacctgaacttggtgaaaaggaactactcacgacgcttccatcgagaatgagtcctcgccgtgttgagtgtctcctttattcctaggagcaagtggcggcagcaagagcgataatccgttaggaatcaagacaaaaaaaaatcatgaataaaacactaaattggatttacaaaccatttgactgaaattttctaagatattcctcaatattgtagaaccaaaaatagagggttagatatttcccgcaacaatgagagatggtatcgtgaatacgagacttaacgagctgaatagtggtatagccgtagaatagtaatgccaataaatgtggtcccactatacatttgcctcccaactagaggcgaaacaactcaggatcgaccgccatattaataacgccagcctttcgttgaggggacaacgggcaagagtgctaggtgaacgactgcattgggatatggctagcgtggtgcattttattgaggtgagctgctgacttagctgttccaactttgctcaggtgacgctcagtgagcgagttcatccagcttatgtaatgatcaggcgatgctcagcgagcaagtgcaagtttaatgattatgtaatacttaagggcgtgctcagttgtactcagtgagcaaagagcggcaaggggtgagcacgaaagcgaaaagggaaagccatctcgctcggcctaaaatccggtgtatatgtacgtacctagcagaggcgatttaactatgtatatcgcggagttactctgcggtgacggcgaattactaatttcggtttagcgtgcctctttgggtctagctccctctatatgactgatatcgccgtgcgtatgtctataaagttgcctttatcgccccgactgttactcgccgaacgtttcgacggttacggtccctttcttactatctatatcctatatatgtcctgctaataaggtatttttgctattaatctagcttactaagccctactgcccccttggttactagtgtgacgatctgagaaggatcgtacttgctaaacggggcaggagcggtcacgtcctcgtacttgccaaacgaggaaggaacgactatgcccttgcaccttcctaaggacgaacgagattaagcgagacaaacgcaagggtataagaagggaagaacgcgcactcagatagtttctctttttccnnnnnnnnnnnnnnnnnnnnnnnnnnnnnnnnnnnnnnnnnnnnnnnnnnnnnnnnnnnnnnnnnnnnnnnnnnnnnnnnnnnnnnnnnnnnnnnnnnnnnnnnnnnnnnnnnnnnnnnnnnnnnnnnnnnnnnnnnnnnnnnnnnnnnnnnnnnnnnnnnnnnnnnnnnnnnnnnnnnnnnnnnnnnnnnnnnnnnnnnnnnnnnnnnnnnnnnnnnnnnnnnnnnnnnnnnnnnnnnnnnnnnnnnnnnnnnnnnnnnnnnnnnnnnnnnnnnnnnnnnnnnnnnnnnnnnnnnnnnnnnnnnncttgccgcaggaacgactatgccctcgtaccttcccaaaagaacgaacgagaattaagcgagataaacgcaagagtataagaagggaagaacacgcacttagatagtttctctttttcctttcttcctcgtacttagaatttgattggaattgcactcttttcttctgaatcgaattggctcgtaacaactagcgcgaactgactaatcctttaccctcgttcgatctctcgagtactctatacgtagctttacctcacctatcctataacggataaaggtccgtacaagagggaaacacatataaacctgcacaggctcgggaaggaacatctatgtcattacatatctgtttcgatatcaatccgtaacttcaaataacgcacttctgtacattccttatatctaacctgtgtatcttaacaacaatgttattccctggtctaattattcttagatagcgatcgataaggatcttaaactcggcatcttaatattaaggtaatcaaacctctactttattatggtttcgaaaattacattgtctagagcttgaaatatcttgaaatatatatatcacgatcacaaagtcataaaacttatctaaacttagtaaagaggctagatatcacctaagaagtatcgagctataagaaaaacctcttatagaccaccgttattaagatatcaggttgtaatttatcacatttactatgtgttttggagatggcgggtcgtatgtggtggcggctcgtatgtgaattacgttagtggtatattagtagtcagcagccacgtgtagcgattatataaacacataccaagataactagatctcggaggagaaccctccttttcacaaattacactcattttaccctttggtccagtatcctactgctcgtaccatacaaaacagcctctcttttgttcaacatatatcttttatctatgatatacgcgccgagggcgttgatatataatgaatacttattcctgtaagggcgctaaacctaacttagctagtattatatttaatggtctaacgcgagcgctgggtgaaatgaccacgatttcccctcgaaagaccacgcacaaacgtggtcttttcgccgtcaccccgacttactccgtacaatctttccgtacaatatacggaatccatagctctgtttatctcaactccgctagcttaatcaactagacataacaagaaatagcgtccctcaatcgtatcagcccagggccattagcctatcataacctctgatcgaccctcttagtacaaagtgttttctgtattcacaaattccaatcacgcttttctctcctttttattttacatccgtgatgttccgagggaattcgactgcagatggtagtcgggggcccctgtgagattaacttggtttcagtgatattaatggtcaaacttggtatttaatattatgggtacttcatatatatacggagtccaatttcaggcctatggctggggcgcagtcatgacatctgtggctttcccctaccgtaaaacctttcataagaccgattgtggctgaagctgagcaatacgatggcttttatataggaagatctgtttccggatctccgcaaacgtggttcataccctagttcatctgaatgtgtacaacatacatagatattgcaatagaatacggagtatacagagttgtgtctatttccggctccgaaggaagatggaagagaggtgtcgaatgtactgtcatcaatgtggttccacctgcacaacgggttattattcgtgcagtttttattattatattgcatattccgttccccccagagatctggaccccagcttgatatgtgatccatgttctagccctttaatattgagctggaacagcgaagacacattgcagccattgcagccattgcagccatgcctgcatttcacactctttgagcatgccgtaaaatattaaacctatttttatgtcattagcagattgaatgaacccaaaaaaattccccgatgtcagaaagatacttggggccgatcccttgatgcggtcggacaagctgcaagcatcattgcttcggcacgcgcgtcgatcactactttggtatgttgggattatcaactccgcctcccccttctaaggcatgtggacagtcgatcctggacatcccttgtaattattctctcagcctctcgccttgtgcaggacccattggtgaactatcgatatctcctagtcgggcagtttgaacgagtctgaaatgatcaaaagtcgccaatctccttgtatcggggttgatggcctttttactctttgtatcccgataacctcttccataaacacaacattctttccaaggttcaagagaatgtcgcggtggggaggaagaggggatatttgacccctcctaccgttgttccaagtcgtacaacatacgatgcacaatgccctgtggccatgtcctgtggtacatcagtccggtcgtcgattgaatgtcgatcagggatacaaaattgatgcgttcatctgcatgttgtccgaaccacccccaggtaccggtccaggtaccggcccaggtaccgtatacatgcacagttgatgccgtgtatgggattcgggagccgaactagacctatctccttggaatggttcaaagaatgtgcccgatatgccgtcctgatttgaggaactggagatacaggtgtatgctgtttacttcggtaagactacactggaagataaacccacggtccatgtttccagaaaacacctgggcacgtacaaaagtacttcgctttgttggcgggattcccgattataggttattctggacgaatctggagtacggagtactttgacactatatatcttgcccaatgttagttccggccgaggtaggtgggtttttggagtggaggtaggtgacgagaccaccgacgcggcaaaaaacgcgtcgttggagtgctccaattaacgaaagacgtcaaaagaacagtacaacatacaacatagagagcgagagagtgggaaaacaaggacagaagcagatcggggaggccgtttttgggaaaggcaaagtcaatttcaaaattacggtattgttctgtacggatcggaaaaggaaactaaagttaattatagcatcagactatcaaggcaccaatatgtactccgtagtacatgcccaactctcaaggctagcaaatatagattgctatatataattgagttggcgatatctgcgcctgaccatccatgtgtgtctaccaagtatgtatttcgagtatatagtctacgggacaagcttcagtctaattgttgttccatatatcagccgcaaaatagccagatatggaggttatacccgtaggatgttgagtagaagtaagcaggatggatctcaagagtgtatatccaaatagacgccaaggaagtagatcaagaagaagattaagaacatctgcatccatctcttttccgtcaaaatattcttatcgctccttgatttccgtttccggactgagggatccacgaccattgagaacttccaagtatcaaggagaaaaaagggaaaaaaatttgaaaagagaggtttggataaccgatcgcattcaatcgttttggtctattattttacttcctaaagcgtgaaggcaagagaaatcgagaggaggaaaaaaagataacacggcaaaaagaaacttgaacgtggacaaccctgtcttttcccccccccggtctaaacttccattcgaatttcgaatttcatccttcctctgattacaactctccttccctttttttcctcctcaatttctcttccctcttccctctttcaatcccccttcgctcttttcctccgttctctcgttttctcgtgttatagggaacctagaccttttgacctgggactttcccacccagttccttccagatttgagagatcatggctcctcctccacgtctgcgcatcctgtccggtgagttcaacttccgcctaaatcttaacgtctgggatatcacaaaaagatggttcgtcgtctaacgaaagtctgtgtagtcggtggcaatgcgatctcagcctttctctcatggcgacttcaggcgacagcctcctgcgacgttacgctggtctggaaatccggatttgatgccgtgtctcaatacggtgtctcgttcaagtatgtatctaggttgctgtgtcacagccagatggctaactccctccgcagatcaaaagcattcggcaacgaacgattcaaaccccgacatggtgagatttcgatatcaacactcggcctaagccctagccagagcccccggctgacttgtcccggtttctagttgttcgtgctcccgaagacgcctcatcccgtgaaaatgcctatgactatgtcatcctctgcgtgaaagccttgccggacgtctacgaccttgcctccgtcattgaatccgtcgtcactccccagcacacctgtattttggtgaatacgacaaataccctcggcattgaagcccatctcgaacaaagataccctaccaatgtcatcctttctctcgtttccaatgtggagatctcccagacgggccccagcgagttcgaacatctaagctcgagtgagatttacgtgggcgcaaccaacaaatcttcctccatcccgacatcagtccagaacgacatggcggcggcattggcaatgactttgaactccggtcaggtcgactgcaaggtttccgataatatcagacaggagcagttcgaccgaatgatagggtgagttcctttcgatccgctcgaatccaaactttgcatgctaaacgtctcccagcccgatcgcgttccatcccgcaagtgttttgttcgacaccccaaaccatacacaactcctcgaaaaaaccggtgttcgtccactgataatgggcttgatcgacgagatgatggagctggcctctgcgcacggttgctcattccccagcgatttcccggataagacggtccaaaaaatgattgcaatggaacccccgaccacaatgtactcagatttccagggccgacgccccatggaggttgagactttcctagggtcaccaatcaagttggcaatcgagtccaatgttcgcgttccccggattgaaacaatgtacgcaatgctacatcacatcaatatcgcaaaccagaacaagtcccggcaagagtcaccccctgcatcggtcatgggtcagccgcctccccgattgtcttccgcacccccacagcagcggcctatgatgaatggtggcccgccatctatgcggggaagtcgaacaccctcaagcatgagcatggtcccgccacaaagacgaggcccaccccctggtatgatgccaaggggcccaggcggaccgatgccgatgccaccctccaaccgagttcagcgcgacccatcattggagggacttgaggaattcagccatttggttgtctacgacgagcagggcgaaccgagtataccgcatcagaatggaaatgggtaccccgaaccagcacctggccctgcttcagagttgacattgagggagagagagctggctcttcgccaacgtgagctacagctgcgtgaacaggaaatgaacatgcgccgaggtcctccgggcccaggacgtcgtggaccggctccctcccgccctgccacggccttcgatgaagaagatgaggattactttgacccgatggataccatggcgattcctcacatcgaccccgacagtgtcgacatgatgagcatgacttcacgccgagggcgcaagggccccagccacagccagttgcgtaaaaacccagaatttggtgtaagcgctgctccttctggaggcagccgcccttcctcatcagccttcaaccgctactttggcagaaaacgcacgagtgaccgtgtgatgcaagaaatcccgggtctccatgattcacttatggacaaccccatgatgagctactcctccaacagatatggagccgttgaccgaaaccagatgcacgcggattctcgagccaattctttaacggctagccacatgggcgactacccacctcgaccttttccacagagccggcgaaacagccagactcctatgactccattcggtggacccccgggaccccctggcccaggagggccccggatgggtcgccctccaatgcaaggtcttggcccctctggtggacctaacaatggccagccatcacctcctggtaacatgcgtacgccggtgccgcgctatcctcagggacaaggaaacgcggcagggccgcagcaagttgagcaacactatggggtgagcaacgcgttccccgctaagggccttcctaaaaaccagaatctgaccggaagtgcgagcgccagcgcggggagtggtgacagtggagcaagtgcaaatattgattccgaaccctcatctcacagtagtcaggtcagcctcggcggccagggggtcgcggcgcccgttcgctaaaaaaaatcctttgaaaaaaaatcccgcttttctcaacagctgaccggcgttccatgattgaattcccttttcggcattgcatttttcctcggcttagacaatcatcgtccgccgaaattggtcatgtttggacctttttgcatcatggtgtcattgtgctgggactttattcttcggtcccgtgctattgaagcactggttaatactctgctgttcgcttctttacatatacatgagggacataggggtattcgttgctcatcttttcattttttttttgtttcggagtgtggttgggataacgaggtgcgcgtgcgagttttgtctttttttgtgtgattttgctctgcatcgatactcatcctgtttcgcggcattatcgatttttaatgaggccactacgcgagcctagactgggacatccttatccttgctgtttctcttcctcctacctccttttttcatctttacagcatgtcgatatagcgtcgtcgttggctcccctgcccaccttttcatctctctgcatgactgtatactatcagctggcgcattccgtttcctcccatctagactcgtatacgcctattgtctccattttgtctgttcatcatcattcgctcccccgggtatttccttcatttgccgtgtctttttccttgtctctcattcggcttggcttgatgcaaatggcctcatctttgattttgtggttcggtctggtcttggcgcttccaaaagagcggggattgaatttattcggttcattgagttgtgtcgtgatctgcttatggggttcgcgctttgctgagaaaattaatgaagggtgcactgcagtgttccgtttcgctgcatattttgaacagcactttattgttccaaggagcacacaaattgatagaccttaccgttataccgttgaggttgttacagcttattaccatccaagtacgtactattttaatgaatgaacaggagatattcgaatgctgtataaaatgaagtatatctgtatcgacacgtgattgcctgatagtaaataatcgataaccaacacaacctcaaaacaaaatccaaccttcacgcgagcaagaccatacccagaaccatatctcccacttgagccagtttccaaattataaacaaaatgccaccccctccaatccactgccgccaagaatctaacaccacctactcccgcccctctatcctcccagggaacggcaactacaacacaacagcaacccacacattcaacgcaaacccaaacactatatacacccccaattacaactacaacgcctcaaccccttctatgtccgctgctaaatcgcggcaatatgctcacctccattcccagctcgcacagctcaacgccaacctcgccgacacggagaacctactccgcatgaccgccgtgcaggcaggggacatgcgcttcctaggcgggtattctgcggcgctttttatggcgtctgcgaaaatcctgggagaggaaggggtcaagggaaatgcggacaaggagaagaaggctggttccgaagaggggggaatcaagagggaggagagtgatgaggattgaattgatggatcattatgatttggtattgatttgatatgattatggtgagtcggattgatcgtagttgtgatgcttcatgggctgtcggtaataatttccatgacttggtgtgctaacatatgtccaatgttcaacccaacagcagagatatgactccctttcttcttatgctctctctatccaaatgaggtgttttcttactccacaacgaattgaccaccgagaatgatcgctggctcatcgatgttatggtgttcataactatttccagtcatgttagctgtgctccatatactacggcaggggggtgatttatctctgcctaaaggccgagccagccttacctgagtgtgcctacaccaccagcctcgagaatgagtgttgtctccgtcaacggctttccagtccagcgcatggcaaaagcacgcagaatatggccgtgcgcgacaacaagaacatcgcccttgagattatctgggttctcgaagcagggacgctggtatttgttcttgatttcatcgatcagagcgtcaaggcggcgaatgacatcctcaggggatctgccaggagggaaatggatgttagcatggaaagactacacccgaacaatgttcaacgcatagcttggaagcaagacctagaatcagaggacaacgaagaaaataatcacttactctccaccgggacacccatcggtccaaatattccacggcccctcgcctttttcaactcgcagctcacggatctgcttactcgtcaacccctcatagtccccgtaatcccactctctcaccgcctccgtaacttcaacctcagcctcggtccggattgcctccttgttttcgggcttcccttgttcaccccaaggcattcgtccccggcagccaagctcgaggagctctagggtacgctgggcgcgggcgcggggggagacaaagctagaacggctttgttagttgcctttggagtggaatagtggtcatcggtgtcggcgaattgtttcttacacatgagcgagcttcctgggaacaactagtctgtcgtttccgacgagggctttgcctgttgcttgaatgcgcttctctccattggctgtcaatggtagatcggtgacaccggtgtgtcgaccattaagcgaccattcagtctcgccgtggcggataataaagcatcggggagccattatatattatttgaaatggatctagtgaaaaggaaagaagacggaatgaaaagtgaaatccggcacaggttcaggtctgggtctctttgcgtcatgggtggaccccgataacaggcttatcaccttttctacctccaacctcggaagattgtccatgtgcaactattcggctttcagtatattaaacattagattatcttttgatctatccctagcccagcaaggatatcaacatatcactgacaagatacctcaagactgtggatttcttccgtgagatgggtctacactttgtagtacttccagtcttgatctcttcgaccatcgaatgccgtgaacacttcttatccctgaacaatttcaccttacagctccgatcgatattgacgttgatgagagcctccgcaactccattctcgaggttggtgcggcagcccgaggacccctgtcccgcgtagctgactgcagtgccaacgcagtgcttgttgtggaataggtcaaaggtccagttgtatttttgggcttggagttcttcgggaggatgtgaggtagggtggccagctatggttgctgggaggaggagagttagggcaagaagggattgttggatcagcttcattttggtttgatgggttgattgctttttctttctttctttttcaatgggagattgagctagatatagttccttctcagcattgtgtagtgatgactgccgtcctaggtcttaccgcgggttgacgcgcacatgcagttcgtactatgggaatacacctgatctacctatcaatttgtcttacaggatattttgcatacattcaatttctctatctgcaacttggccaaatgctagcctctgtcgcttgttataacccatgtcgatcatagccttggaacagtataaaccactcagccctctctctgaccttcgatccaatgcttctagagagggagtccaccgcctttctctccgccttgtttacactctttcaagtgagccgagttgtccaatattctgccaggcaaatatccatgccaccatgtcttgcttccacacaatattctttgatacaccatcattcaatgaaaccgtggacagcaaattccttgacccaaacgagcccttgggggacccatccagcccccgagagagcagttcactgaaactgtcggccatatttggtcatctaaaacgttaatatggaacgccgactcacctctagaaatgtgagcctggactgggttgagcgaggtgatcaagccggggatattgtctcagtacatctcattcaaaacacatatgcccggctgaaagcccagtatgcagaaaagttgcgccagaattgggttgaacaacttgagtcacccaaccaagcccttgagcagctgtctctcgctgcgtgcctaattgaactgtggaggagcatgtacggcgctataccaacaacagaacaagagcagctattggaaaacacagcgccgttcccaggattcgtggacctggcttgtgggaatggtatccttgtatacgtgcttctcatggaaggatacaatggcttaggctttgacgcttgccgtcggaagtcctgggaaacattcccatcagagatacaggaatgtctggaagagagaatcttcattcctcggccttttggggatgtactggacttggaacaaattggagcggcgatacacaccggcgatttcccggataatacattcatcatctccgaccacgcagatgagctcacagtatggacccctttaatggccgccctatcaaatccctcatcgccattgccattttttgtggttccatgctgttctcgttcacttgctggttcgtcgtatcgatatcccccgccaaaggagggtggtccaatacaaaagagtgcgaatggaaaccctgtcgcaaggaaagtcgatgataagatcgaacagaatctacagcctgcatctggtgatttgagggcacttcgggcaatcaagatcgaagaaaaggccgagagcgggtttctgaattcgatgattggatctctcgctgcaaaaacaatgagtcttgccgaggaaattggtttcgatgttgagaagacatggctacgcactccgggagcgattaacatggcgctgattggaggtcgacagcaggtcacaagcgagtggctaaagaacccggggtctatagattctctaacgaaaagaaaccaagaagatgctgttctgaagaagattatggaagtggttgagcgtgagtgctcccgagatggtggcattcgggtagctgctaagctctgggttgaacggacgaagagtcttcaccggggacaggggacagtgcaccaagcttaataagatattcaaatgaagatgccaatagcattcacagatgactgctacctacctatcctacctttcgtgattcaagtacatttttggtaaactctctaatagcagaaaacgagcccaatcctcctggacgatatcctgaaggcaagagcacaaagaatgtagagcacagcagcaacgccctaaagctagcgttccaagtccagaatggccgaagtattgataacgaaaagaaaccgtgtcactaaccatcttcagagaacctcgaagctaacaactgattcttcataaggctgcctcggtggttaacgagagaaggataactccatatagtaaataaccccgggacgaagcgcatgggacaaggtatattaatagcttgccaaggaagatcagcaagtacttggctccaacaggagggcccctttcaaggaaaatgatagggacaaatggcattaatatgtcatcatatatgctctagatctattcacacctaaacaaaacataaacatatagcgaggggaatagagaaaggagtgtgctaatgtacaataatgttacagacctcttcaactccgttgctaaatgttagttgaagatccaaatcacaacgcctaggctcccattataacgcaatcaaaccgtcaagacatacttgaatcactacgtatcaggcatcagacttcatatgatcttcggggcaagcggcctcttttccactgctgccactttccgcacgagcgttgttagaggccgtggctgatgcttgcatagcagccttggagttggcaggtgtcgtttttgatgcagcttgagctgcaaccgcagccgcattctccttgaggcgtctcaggcgttcaggtcggccctcccctgggagacttccccataccggttcgattgaatcggcacgccagttagtccgattcccaccgagcgcgctgcgcttcggggagagcggggagaaggtggagcctcccacgccggattcaccccacatgcggacgcgttgaagcttgcgcagtttggagagaccgtagacacagacgacaccagtcagagcaaagcagaacacggagacagccccaaaaccgaaatccgattcttcaatgaaattcttcaagttcatgccgtagagagcggagaataatgttcctgttgcgaggccgagtgttccaatgctgaatttgagatccatgagcatgagcgagttgcggttggcatcaaggatagccttgactctgagttgtgttagaggtgctttgcatatcatgaacgattcaacttacacttcttccgtattgcgaatactcgtcaccaagtttccactggcctgaacaatctcatcgcacactttgtggtatgactccagaagcatttccacttcttggtggtcatcctcttctcgctctttgccgaccgatctctcagataggtacattgctgctaaatcatcatccgcctccagcaaatcatcaatggcatctcgtaccaggcgagctttctgctcaaatgtacccagtttcttggagtagatcaagagatgccggagcttatctcggtcaatgtcctcctcgagtgcacgaagaacccgcacaacaggatctctcactccattgaactcctcttctaggccactcgtgacactaatgaggacggcttccagcgcgcgaaactcgtacggtagcggttgactggcaccctggggttgcctttggcggagctttccttctaaatcgtagatgaacagcgattgcatgtatgagtctgttgatccatacgcgtcaaaaacgagtacccggtccgctttgatgaggacgcgcagatgcaatagattgatgagaattgctctaggtcgtaccaggatatgagggagagtcgacgaatcaatcttacgtagatctcggggaagaaggccatactgaatcgtgatgcaccggttagcaaatgtcaaactcagactcgagacctttttaccaaccttggcaatcagctcctgcttccggaactctccgttaacgagtgtaacgtctccattgatatcaaactccgtgcatcgaattcgcagttcatttgacgccttagctgatatgctgcggccaatattaaacatcccctccgttccctcatccataagcccagggccagccgggccttgatccttgtggtcggaagctttatgccgcttgaggccaaaaagccgtcggagaaagggtcggcttttggttgatgcatgacgcgagaatttcagctgcgtaggcaccaatggcggcggcattgttgctctagtggaatttggtcttccatactgagtgctgcatagtgtggtatcaagtgttgcggggctatgagtattgagacgcgtccagctcgagaattgtcctgtcgagaagcctttatcgcggctggcaaggcgcttcggataagcgcatgctgatggtacggctgagaacccagactgcgatcgtagaaagcgcaataaagaggcagaaggcgcagacagcctcggagacagcatgtctctgaattatcgaccgagctgtatcgcaagttctcccgatcagatcagatacgcatttttttcgtttcccggaacaattttgacccgagaatcagaactataactggaaaacactattcctcatatcttgtactatgagaattagaatattgattctatctacgtaccaaattactatcaattggtcaagtcaaattacttccttctcggctcagtgcccaatcaaccatcacccttctccctactgcattgattcaagtttgcctcaatcgcctcatagttgttgggaatttggagttggtttggctgactgatatgaggccaataggatccaaaagacggaagatagagcacagaatttcaacgggcaaagacccaagagagggaggattattacggtggtgtaacctaaactccactggccataaacatgtggaggcccccggtgtcattggactaagaaagagaatttaaaacatatacttcctcgtactgagactatctctcgccactggatctaccatgaaagctatatacaaagtgcattgcccctcttttgttaacacttgaagccaaacttttaggcaaaacgctggaccaggaagcagaatgctcaatgctcgcaagaatgcgcaaaagccaattgtatctcgaaatacttgaacagtcacgaatactaactgctcaccaatcgtcgtcgttgtctttctcgtcatctaccaacatagttagcatatagatccgcctttccgtgttgggattgacttaccacttccgctgactctctgttttcgcttgttgagagcatcttgcaatgcgccggccaaaccaccttgaggggcgcctcctgcgttggagcttgtagctgatgactcgttagcaccaccgggtaccaaagctttacttcgatctttcttttccgtatccttgaccttgcgcaagcctgcgcctccgtggccgccagaagctctgatggacgccagcagatcgctgtgtccaccggcgggctttggcaagggtggtgcagcaccacctccaggcgccccaggaggtggaggcggcggcggtggtccacctggtgcccccaaaacaggcgccggaggagggggagggggcggggnnnnnnnnnnnnnnnnnnnnnnnnnnnnnnnnnnnnnnnnnnnnnnnnnnnnnnnnnnnnnnnnnnnnnnnnnnnnnnnnnnnnnnnnnnnnnnnnnnnnnnnnnnnnnnnnnnnnnnnnnnnnnnnnnnnnnnnnnnnnnnnnnnnnnnnnnnnnnnnnnnnnnnnnnnnnnnnnnnngtcggggtgggggagggggagctgccgcaggagaagacggtgcagctggcacgggtcgaggcgctggggggggtggaagtgggggtgaaatggggcctctggcgggtggaggaggaggcccagttgtaatgctcatgggcggcactttggggggcagttggggtggtgctgctgggctcgccgtgcgaggcggcggaggaggaggtccacctggtgcagggctacggctggggggtgccggtggcacagacaccttgcgatcaccagagaaaggcggtggtaccccaaatcgagattgactcgattgaatatattgactatcgtccatcggtgtcttcggtggtcttggcggcggcggaggcccagcattgacgttcgaagttgcgcgtggacgccgcggaggcacagggccagcgggctcagcgaattttcctgcgtctgcaaatggaggcggcgcgttgaatcttcgcgcaggcggagatggctcacgggggagggaaaccggttcctctggtgcttcagaacgtgttttccgtgatgggggcggcggcggtggtccccttctgcttgtcgagctagaacccgtgtcttgaggactgatcgtggctactttcggagcgggaggtgcagaaggtggcggtggaggagcagcctttggtttattctgatcctcagcagggacagactcagccgctgccgcctgcttctggtcaatccaagctttgatgaattcggaattctcagcgatttggtcttcggtaattcccatccccttaagctcatccagcaaacctttccaagaggggtcactcgtatcaaatggcaaatccggcttagctgatggtgtgattggggacagtgtcagaggtggaggagcaatctgtattgaaggcgcaggtgctgtcggcggtggtgcactgggagttgggctcgaacgatgtaacaagctgccaaacaaagaccgtcctactttcccattggtaacaggagcaggtccctggcctcgagtagatgcgaaaggagtcttagtggtctctttacttgcatgtttctcgcgctcatgcaccttcttaataaaggtcttggcctccttctcgtcgacaaaggacaggccggcgggacaggcttcgagctcgaatgtatgaaagaaggttcggtcctggttgtaagcgaagttgtcatagatctcctgatcccagatcacgcccctgccagtgggctgcatgcaacaacgcattgtcagcacatctactcttatctccaacagcagtatggaccgcttaccgagacatcgactattttaagccaaaaagtccttcccacgaggtcattgcagaggacaacagccccttgaattccggtatatgtccatttctgtccatccgggtaggcgacgtagagtcgcgcgacagctacggcgaggatcttgttggcgggtttggggacattccgcttaacagtttccttgtcggcatcactgaggatggagggcatggtgagtcgagatggtcccccactaaatggagaggggaaaggtgatagttcgaagggtggttacgtgagtagagcacacatccatggatccatggattgcagccgggcgggtatcttcgaatgatggaatagcgccaacacaccgacggacacggtagtgggggagggtacagggtttccttataatcgattgattagatccgaaggccggggtgttagagaggagccgaccggcggttgccttagagagttggagaggatgaaccggaggtgagaaggcgtaggcggggcgcaatacaccggagtgacctggccctaccgcaacaccgccataccggcacgtggtacttctcttgtactattcaaagtgtggctacactatataattgtttgatagtctttctatttgatattttgatgtttcaaaaatacaaattgatagaacattgctgacatgatcttcgtgagtgacgaggatagcgggatgcggtttagcgtgctcgtttcaatggtgttctatgtcatacaagaaggaaccattttaaagatgagctagttaactaagtgaatatgcggtgtgtcaatatggctgaccagaaataggatgtatgcagcatattaaatgtatagaagacctcgggaatattctttggactagcaatacttatctatcttgttttgactatatatatccagtatcggctatgtttgttgcaatgaggtttatattgcatttcaatcaaatcatagctaccagtgcatgccccctaagttatccccggtacccactaaacgtagccatcaaatcaaatcatattgatatgttgttcttttcccctcatacgtgtctaggcaacttctatcatgctatttgttgcaattcgaccaccgacgtcatccctcctgagatctataaaatagacatccaaccgccgttcaacacttgcttcctcgactcaccatcaccaagttacaagatttatttgttctatttaccggcgaacaagagctagtattagctagcgactactcaacaaggagctcttctatatctccaaaatgccggtcatccccgagtcgtcagacttcccatctgctcccgaaaagggaagcaatgaggccgagaagaaaccagagaaacaaacccagaaagcgaccgcggcggacttcttgtcaaagggacctcagattccagacagtaagttgggaaccagacctatataggctcgcgactgacactttgtagatatgcctcccaaggcttcgaaagaggagctcgaggcacgcgcgaaggaactgaacgagtcatccaactaagagacccttggtcaaaatttttattatctatctgtacttcattcagtagcagtttctggcattccaggcaacttgtccttgtcgagtgtaactatctatagcgggggtcatgacccaaaactagctccagcaccaacaaacgaagagtagctgcctgagacttatgaaacaaaccaaatcaccaaaaaaatatactattttttatttttcttgtcctcaaaaaggctgcgtatacttccaagcaaccttggaaggacctgaggtcgttcatcaattcattacgtcatacatcatagcaccaggacacgtgatcgcgcgacatctcattgaccagaaccctcattcctcaacgcgttaggaagtgctcccaatgcctccagaacggtccaatgtgccggtgaagctgtctctaccactggtaagtatcctatcaactcggcccaggcttcccgctaaccccccattaagcaataccagcaagagctcttcaccgaactacgcgccgaagatgagctagtcattcttgcacgaggcctggggcttctacacctgatatcaaacctcctccacttttacgatgcggcgggaaacaacctggtcctggtggtgggtgcagatgaacgcgagaatgagtggatcggagagggtatgtggattggtttacatcccaggtcggatgctggggttggaagctgatggatcccgaactcagcattggcggagcattatgctaccagcaagtcccccctcggcagggggttaaaagtgatcaataccgagaaagctacggtgccaatgcggtgggtttctcggttctaccattgtcaattacggcgtattgacaaactaccagagaaggaatatatggcgaaggaggtattttgagtgtgacatccagaatattggttgtagacttgttgtccagtatgtatgctagtataatggctcaaatcactagctgatctttttagaacttcttgatcccgagaaagtcaccgggatggtcattttgcatgctgacaaggttttggcgacatctcttgaagcattcatcatcagggtttaccgacagtcgaacaagagtggcttcttgaaagcattctcggactcaccggagccattcactacaggctttgccccgttggctaacatgctgcggaaccttttcctacgcaaggcctccttgtggcctagattccacgtttctgttgctgagtccctagaaggaaatcgcaaggcagaagtgattgagttggaagttcccatgagcgacaaaatgagggaaattcagaatgctgtcctggaatgcgtagagatcagtattactgagctcaggaagagtaacaccgggctggatatggaagagtggacgttagacagtgctttgcacagaaatttcgatatgataatcagacgtcaactagacccaatctggcatcgtgtgagcttcaggacaaaacagatcgttgccgacctgacaagcctacgagcagtccttcagtgtgtctctcatgcgtctttccctttctctatactaacagctctgcagtgctttgctcagctatgatgcggtatcttttgtgcagtaccttgatactattgtgtctgcgcatgctccgcctcccggctccaacagacataattactctccgtggcttttccttgatgctgcccatgttcttttccagacggcgaaatcgcgagtctaccaaggcaaattgaacaacgaactgactcgcctttcatcttcaactacattttcttctgagttgaacccagttctagaggaactcccaaagtggagtgtcctgtcagaggtccttgcagaaatcgaacacgatgcttacctccatcctgcgagaatgcatcaatcaaatagcaccatattgattatgtgtagtgatcagcgaatatgcacccagcttcgcgagtacattgccaccatgcatgcccaaattgcccaagggtccgagcccaaagaacatgatgatccgagtgatgacaagccttctgcagagcttatgatgcggcgtcggctgcgagactatctcaattggaagaggtctctttcaaatgtcaacaagaatttgtctcagtcaggcgaggacgataggtccggaaactccgagtcatcagcggcccagagtgcgcatcaaggacggcctcccccaaacaaacgtcgtcgagtacgtggcggcggtgcagttacctcggctgcaggtcgtgtgccaaatagcagtgtccaaaccgaagtcgaattgcccggtcaggtcatcagcttactaagtgagattcagcccaccggcgtggaagaaacgcagaaagaggaggttattatcgatgagttggaggatatggaagatttctacgaattgtatgatatggacgatctggtcatgatacacccttacgacggtgacatggatgagcatatactcgaggaagtgcgtccgcgatacattatcatgtacgaacccgatcccgcattcattcgaagggttgaggtatatcgcagctcccattcagggcgaagtgtgaaggtctacttcatgtattatggtggttctgtcgaggaacagcggtatctgagtgctgtccgacgagagaaagactcattcacaaagctgatcaaagagaagggggtaagctaccctgctgcatccttcacactgttaactaacctgatcttcagaacatggcagtcaccttgacgcatgacaaaaaggctgaagacccccaggagcaattcctccggaccgtcaacactcgtattgccggaggaggacgactggcggctacagcatcccctcctcgggttgtagttgatgtgcgggaattccgaagtgccctaccatctctgttacatgggaacaacatggtcgtaattccctgccagctcaccgtgggtgactacattctcactccagacatttgtatcgaaaggaaatcgatccgtgatctcataagctctctcaagaatggccgtctctacaaccaggccgagacaatgctccagtattacaagagcccattactattgattgagttcgatcaaaacaaatctttcacgtttgatgcgttcgcctccgttccaacaggtcccacgtttatgacagattacggtttctcatcttccggcactgcaaccaccactagcagcagctcgcttgccaacccgtctaacccaaagtccgctcagcatctaatagtgctccttactctcgccttcccacgcctgaagatcatctggtcttcgtccccttaccagacagccgagatttttgcagagctcaaaaagaacgcccaggagccagatccactccgcgcagttcagctaggcctcgatattgatatatctcattcgcttggctctgctgacgtcatggctgccactgggattgagcaccgtaccttcaatgttcttccacaagacatgctgcgagctgtgccgggtgttacgccccaagctttagagcggctgataatcgaaacggacaatattagtgatatcgccaacatggatgtcgagcagctggatccactggttggcaaagaagctgcacgtaaaatcgttgctttcttccagagaagcgtatttgattaatggaggattcattcttaatcaaatatgactttgatgcaaattaaataagttcatcaaaaaagccctgtatgtcagcaaatgcggtaactaatgtgtaacaatgtaacaaatacaactacatcatcccatcacatcttcatattttgcccaaatcagccagaaaaaaacaagaaaaacagcaaacagccgagacatccgagttctggactcttacggagtacagagtaatcaatttgaacctggtctactccgtaccccgtcagacttcttgtccgtcttggcgacgatcgtgcagatcagctaaaaacagaacagcccccagtcaacaacagccgaagcaaggacccctgagaaagagtggggatgtggatgagtccttttaaggtcagaaatattatggactcctgacgccttcaacttatcaccatgcatctcaagactgtgttgactccgatcgctttggctgctgttgtcggtgctactaggagtatacgcgatgttgagccgtgtgctcaggttagcaagtttgtggaagaggccaaccgaaaccagagtacgtcatgagctcgaaattatcaaaattatcaaaattatcacttggttgataactaacggtcgcagcaaatgcccttgtccctcatgatttggcacaccaatgtctgctatctatgccctttgactcgaaccgcgccgttgatttcttgaatcaggttcgaaagatcctcgagtttcagtcgactatcgatattttgaagggtaagtgatatcaattcaaatgagaattctttaacctggctaacctgtatctgctagatcctccatcgggatataccatgccctccacggatattatggggggaatcgatataatcatcgacaaggccaagagcaatagctataccagccaatttgagatggacttggaaatcaaccaccttatcaaaacggcccatgacggtcacctggccttccagctatgctcacagtcaatcttcacatatcaaatcgatatgcctctagtgtcaatttcaacagatgggctcgcacttcctcaagtgtacgtgttaggtatgttcagaccggtatatatatcaaaaatttgaactaacatgacaggcgatgcaaaactgcggaaggtcgacccggacgccgtctcgcctctggtgtcaatcaacggcactgatgtggctacgtaccttgaatcatatgccaatgatcaaaatctccaggattgtgatgcacagtaggtgtccttctacagccacgacattgaatcacatttaactgtcgcaggtacaatcgagtgttccccgcgccagcccgtagtgtcaccaacactcctactagtgtggatggaatctgggcttccattggagactggactgatggcgctcagctgtccctcaagtttggtaatggcactgaaaagattatccagaaaacagccacaccgagcgaaaagttcttttcttacgaaaatggcacacacctctacgacatagagtgtcttcctcgagacttgtctacagcttcgagcagcccatctggcgctgagacagcctcctctgagataccgggatttcccagcaccacctggcgtaattcagctaattcgattgctggatactactctgaattatcagagctggagaacacagcaatcatatttctgcctacgttctcatctagcgcatcagaggtcgctaagattgcggttgacttcttgcaaaacagcaccgaatctggaaagaagaacgtattgattgacctttcatctaacccgggtggatacatgtctattggcatcgacctgtctcgtatcttcttccccaatgctgctccatacacagcgacgcggttcagagcacacgatgcagctaagtacctcacaaaggcatactcgcgcgacaacagcacggacacaagcaatgtttttgcgtatcggcagatggttccacctgaccagagcacggacttcagctcgtgggaagatctctatgggccgcacgaaatcctgggaagctctgcttctagcctattagccaacttcaactacacctccacctctacagaaaactttcccattagcggctacgggcctgttccattgaacccaagcaaagcacccttctcggcggataacatcgttattgtaagtgatcgtttctcacaagaatacagaaaaaagagaacaaactaacacaaactcaaatgacagatcacagacggcgactgtgtctcgacttgcgcgttctttgtcaagctgatgaaacgccagggcgtccgcactatcacctttggcggccgtccacagaatgcacccatgcagggtgtcggtggcgtcaagggcggccagtcactcggggtcaactatatcaacggatatatcgagcaagcgaacgggctgattgaagactcagtcaacagtggatcgccactgctgacatctgccgagtggaaggcattcaatgagtccaagccgagcacgacggcatcgctccaatggagtggcaacctcaatctgcgaaatgagtatgacccggaagatagtcagacaccgctgcagtttgtttatgaggctgctgaatgtcggctgttctatacgctggataattacttgcaaagggagaccgtttggcaagctgcggcgaaggctatgtttgggagtgggcagtgtgtagagggatcgaccaagggaaagggtagtctggattcttgatctattgacattctagcagagagacatacatatcatacatagaaattttgtaaaaagatatacatacctggcctgtactccgtacatttgctgaaattgcccaggtgactgtacggagtaggagaatcacaactacgtgcagcacattggagaaatactatttaccaacctaaaccctcaactactttaggcatagcgcgacttggctgccattcgcaccgccgaattatggcagatctgttccaggtagtcacgtgacgcccctgacgttatcaatcacatctacctacatatgtccgtcaacgtccatctgcacgcgtccttacatcagcgctgcctgagagcttgacttctaaggttaacgatctgaatatcttctcgacaccatatctacaacccaaagcttgacagcccagcccatataccaacgtcacaatggatagaccacaaaaaacggaaggcacgatgggagaggtgcgaacgtcgagtcttacccaggtccacaatcttctggccccttttacctacagagacatgatctaatatacctcgattcgattaatcgtaggcaaacctgtcaatcggttctaacctcgattctacctctgcgtccagaggctcagagaccactacaactacgcccccatcccaatcatcgtaccagccgtttcttggagagtcgaacgatcttgtcgtgccccctaacgcaagaataattcgcccgcgctccctgaatgatatctacgacgcaattgaagacctaaaggctgaattagacacacataccgtcgagacacataccccccgaccatcacaatttatctgggcttatcaaattccgcaaggcctctttacccagatagaaacagaccttgaactctttcccggtgttcgaaccacgatcgcacacaacgatttcgctgtattattgaaaatcatgccgggtcgtcagcgtgaacgaatcactgggaatttccgtgttatcgttatgggccacctcaatgctatgggcttgtccttgcagaacggagatttcactgaccaaggcgccgaaataactcgcggatttctacaaagtaaggagcccgattgggcattcggtccgtacgacgcacgtatcaattcagcggcagacgaatatcctgccaccgaatatccctccctcattcttgaaactggcttttctgaatccttgggccaactccaactggatgcccattggtggtatagaaataccacccaagaaaccaaaatcgtcgtgttaatcgatgtggcaagcgacaatccgtaccgcgtcaattttgaagtttggactgaggttcctaaccagtcccatgcccctgtaaccagaaattgtccggccgaagttgttcaatgcacccagagagcgacattgcagaacggggtggtcacaggtggccctttgattcttagtttccccactcttatgcggcgagcgccgcgggctggcgagcacgacattgttctaggggctgctgatttggcgatcatcggtgcccgaccacgccctgccccttaattttccggcatctagcgaaggtgccgaacctcatcgcagcaacgacggggcggccaacaagacgatggtccctccactcggaacagtatctcaatttgttaacaacgagggaattacttgatgcctggtgggttgtctgatataaacataacttcttcggtccaaccatcaaatgagaggataatactccgtcgataggtagcaattggcttcgacgttgggcattgacctaaagataactacgcaaaggttcttgctatccgaatacgaataatccagggggccctggaccctgttatctcctgtaaagtcaatgctccttatataactacgtctttgttctctaaattccaagttgtgctgcccatgcaggcggctctatgtgtagtggccccatcaaaagcccctgcctgagaacccccaaagtttagttacgatagttcacttgatttgtctaattactgctttgaattggtctacaagtaaaataatcttcaaaaaatattttcaattctcgtggcccatttcatgactcttatcataaaagaacgaaaagaaaagcaagtcgaggctgaacagagtgaacacaccgcatgcaatgcaatgcaggaaaacaagcacacaggttcatgatgtgtgcatggcaatcattttattctctgtcatgatcccaagatatttgcacaaaggacaaaaatggtatcgacgatcgatccaccttggaacgccaatggagaaatacctagggtcctctgttcgatggcttcaagcccgtaaaagttatcgcagtagcgccagaatggagggttttcccatcctcatgcaagccgaggtgaggagcagcgtcgtaggccggggaggtggttcatgctcttggtccgttcgaacgaatgtatagagggaatcggatgtcgaaagtgcctcgcgtggcaagtagtcaaaggcagtttcggagcagatgagcgatggcactgtgtccacgacggcgagtaggaggagagggatttggcgaacatggagaataccgaggaggatgtatccggggtatccttgaggggcagagcatcgaactctaggggtagcaggggatgagcttagagctcgtcgacatcgatctccttctcgtcctcgctttcgcggtcctcgtcgaactcaacgttgtcgtccaagccttcaccaccgtaggtatcggtctcgttgatcttggcgtgttcggggagctcgccataagcctttagagaacgggcctcgtcggcggtgtacttcatgataacatcgcctttctcgtcctggtagtcacggagcgagaggagaatgatatcaccctggttgatccagaccttcttgcggagcttgccacggatgtgggccagacgcttctcgccgtcgaagcagagtgcctctaggcgaccattgcctagcattttcacgacctgagcgtactcctggccctcctccttgaagacaagttcacgcttctcgttgtcgttctcattcttgccgcgacgacggttcttaccgccctatacttggttgtcagcatgtgtcacacaagtgaagatcagtggtttccaaagtgaaaaaaatatttcgcgagcccacaagtcaccagcttgagggtaggtggctacccgagacggtggatgtggcgaggaaattatcaccaagaggaggggctggatattttgcgcgcttacctttcccttattcttgggcatagcggtttttcgtgaccttcacctgggtcaagtctctggggaagattttttccttagatcaacgaagatctgaagaggcctaatcgaggttgattaggggagtgagagtggaagaaagaaggaggtgggggttctgtgcactggtattcaaatcttttttattatgtaatcaggcactggctgcccagtggcgtcacagcgatttcgcccccgcttaactacggcaaatttatgccttgatgcctgatttcggggtagattttgaccgcctggtttgatttggcagaaaaggatgagtgtcaagcttggaagtttgcaagggcatttctgaggaattctctgaggtgttgcgataaaaggtgctgtctgatctgtccaagatcctgagtattcacttcatttacagctttcttgccctccgtgcgacccgtcctaagaagcagcacgagactgctttattcacgcaagctccgaagattcggcgcctgccgagtacattcacaatacatctgtgatacttctcttcgtggctcgatggtatctttttgaacctatatcccaaatcaccaattgttcctccgaagtgtccataggtcttcgccggctctgtttaatcaaccttaacgtgcaacccgacatgatatcaatgtgctacgactctcgttatatttcacagtccaagccagcatacccttacgaccaccggtaaacctcttctatcatggcgatgaaatttgtcacgtctacaaatagcttggtgcttcggtattggcccaaatgcaacacccctcctgttgccgcacgctacctgaattctcccacccatgcgatccggcccaaaattgtcgatctctgtggacatcgtgaaagaaacacactatggtggcgagtttccgtgtcacaactccagcaaagcaagcgggttgttcgctcttggtgcgcgcgcagagtgcgaatggctgtcgagcaggctttaagacagcaaggattggataagctggggaacccgcttgtttctgaggctcctttgcgaaggagaaaattgtcaggaaccatggacatctacattcagccgccatgtgtgacgcggaacttagagggggtccaaaaggatgcagatcatctaatatccttgcttctggatcatgaatcaccgaggaaatgacctattgtcgatgagctacactcagaaagcgaggcctagcaagccgtggacatcatgcgactccgtgagactcaatgtatattaccataacatcttgtatcatactactagcagtcgattgttggactgttattgtacatcattaggcgacattgcgatttatagcatttggggggaattagtttgcatctgagatttaaattatttcaattcctgatttttttcattctttatacctccaatttacaactaagctgtcgttgttggctccgaggtacagaagtaaatacagaagcgcgtatctcgctaaatgccgatctggcggaatcaacgacccaggtctaggctaagattcacttgacaaccaccacaacttttcctaaaccttcccctcttcctttttttcgctatgttggtttccttgacagttggcaaggtagacgcgggtgtcgcagtgctcctcacccaggacaatcggctcgtaagctcaaacccctggtcccttactccctaccccgaagatatcgacgacatgcaattctgcggaacatcaatagcaaacaaacacaccttactgacaaattctccgcgcagatcgaattcccctcagtcctccttcccagcaacattagctcaggcagcattgtcgatatcaccgtttcgcgcaaccacgctgccgaagcagcgagcgcatctgccttccaatctctccagaagcggattttaaatacgtacggtgtcaaggccccgtcaccccccatcttgcgcctccgaaatgcgacccagacctcgctcgttctcgagtgggacccaatcgacctagccactgcatcactgaaatcgctctccctttatcgcaatggttccaaggccggctgcataccccgcccgctagagacacgcagcacaaaaatcagtggtctggccattcactccgagtactccttccatctggtcctgcgaaccacggctggcacctaccagtcggagaagctgacgtgtcgcacacacaagatgactgacctgtccggtatcactgtcacaacgggtgtactcgatccacagcagaaggaggctctcggtgctgcattggaccgcattggaggcaagatgatcgactcggtccgtatcgataccactcacttcgtctgcacggaaggacggggcgcgcagtgggagaaggctgtagagatgaacattcctgtcgtggtgccggagtgggtggatgcttgcgagacagaggggactattgccggtgtgcgtggctactatctcaacgcagatcccaaggcccgtcaactcggcgtgatccacggctcgtcccaccagcgtactacttctactctttcgactgcgacaagtgccaaccagggaaggcccagcactcagccccaacggagccccgtgccagagcaagtacccgaagagcctcctttgactccattccctgggggtgagacgagtagccaaccgcaggcgcagaggcagacacaagaggttggatcacaacatgagaaaaacgacatcctgcccccttcacccccgcccaaagataaagccgaagatacagatgagccttatcaaaatggtcaggcagaagcggcacctattccagaggcgaagaacgaggagcctgaacccgaaactgcagaggagagcaatgaagagacagagaaagagcagacctttccacagaacaggcccgagggtgactccgagtcgacaaacctcggaggcacaaagggcaaaggcaaagagggcgagagtgacttcaacgaagttcctctctgaatagccccctgatgatttattctgctctatccttgcttcgcggtcaatctcttaacacccctaccctgcttttgtctcagttgtcgaccaacgtctacgactttatctagtacagttttactttgttgcggttagtggcgtttctcacttgagcgaccaaaccataggattcttacgaacgtattccgactgtgattcctcatttttttttctctgtttcgtgtttgctgttatatgtacagtacgcaattttcctaatgcagccttgcccattgactcgactgatccgatctgcctagatagctatttggagactacctaagtggttacattgcgtaaggacaccaagcctacacatgtggctatgttctctaaattggaaatatcatgaaacgtcataaatgagatgggcacgccagatgcaaggtaaatagtagcctgcaaagaaaaagaaatatcaaccccttttgagaaaccaaaatgcatggcagtctaaacaatatagaattcaaaacaaaaccagttcggactccgttcgaatttagttttcgttgcgaataacatcgtcaatcgcctgtgcgacgtaggcgacattcttttggctcactgtgcacaatgtcagttcgtttttatgagtatccgtgattgaggttccttacggccgctgatagatgctcggcctgacttgagcaggtaaatgtggtatttgtccttcaatgcgtagacttgcttgggggaaagaccggtgtaggaaaacatgccgttctaaaagaacaattagtacaaagtatgttacacatatggtaaaatccagatagcttacctgctggatgatgtgctcccaagtaccgggggtctgcagacggaccagttcattgtatagagccttacgcatggccttgatgcgcgagctcatgacctgcaagtcctggttccagtcggcagtgagctcatcgctggtaagaaccttcttcacgatgctgcagccaacacgcggacccatggagaactcgccgcgaatcaggtggcataggttgttcacaacgatgtcccgcagggtgactgaggcgcggttggtacagtagtggaacgcaccaacacgctgaccgtacaggccgaagttcttggagaagctctgtgccacacacatctccatgtccggcttagtgttaaagaagtagcggacggcccaagcgtcctcctcaacggaacccgaggcgaagccttggtaggccgagtcgaagaaagggaagagcttcttgcgctcgcaaaggtcagcgatggcaacccactgctccttgttggggtccaggccggtggggttgtgcgcgcaggcgtgcaaaagcacaacatcgccctcctgtgcctcggactcgagagaggacatcatgccctcaaagtcaaaggaccgggtttcagcatggtagtacgggtatttcttgatgggtacgtcggccagctcccaaatggtttcatggttagcccaggatgggtcggacagccacacgttagtgggcttcatgtggtgagcaaggaacagggcgccgagatggttggcacgagtgccagcaacggtctgcacggaaccaatgcgtgccttggcctcttcttcgccttgcttgccctcaaatccaaacatcagatcccgcgcgatccctaggaaaggcacgtcgccctcaatcgcagtatattcgtggcggaagagatcatcgtctcccaccaactccttctcagccttttgcacgacgggaaggggccatggctttccatcgtctgtccggtagacacccacgcccaagctaaccttctgcggatggggatcgactgcgtaggccccgttcagggcgaagatttcgtccggaggcaccggggagacgttaagacgggtgtcaactttggtcattgtgatgtatatacgctgcaatggcgattcccgggagcaatttctgggcaatatgtaggtcgcggcgagtataagtcagtaaagatcagaaccttgtgatcgcccgctgagtcaacccgatatcgccgtctgtctttttgccccacatagcggattccggggtcgggttgcttggaaggacgcaatttgcaatgccttcattttcgtttaattcaaagttcaaaggaagagatggccttcaatagtcttcaagttttggccatatgctgatgaacagcctgttgagataggttattgatcttatcttggaggacttacctctaaacaccagcatgaaacgtcatcggaggtctgctggcgcgcttgtaaatgcatcagaagcactgttattctcaaggggacaaatatgagtttttcttatgtagcaattcaaacggggtcgatgataagtgatgtgttgatgggaatacttgggagagtaactattgggtggagataaacgcgaaggtatgagtacttcttctacaacaacattctatttatgtttggctttacaccctcaatgtttctattgattccataatgtgggaaagccaaaacatcttttctacgatgtacttcatctgtctccggttatatcaagatatgaaatgaacaggaaatcaaccaaacacactagaagaaaaagcctgttgagctagtcagaacttgccagatttcgttcgagctattttcccaatcgatcctttgatatataaattgcagccggtgaggatagacgcttgaactcggagttatgctacgtaagtctctccgcttcgacggtgataaaatatattgacacggacattctgtgcatatctacggagtacatagttatgttgcagttagttacgtgggggtagactgaacttggtacttatgtattcaaatggttaccccgcgatctgtagttactaagtggacttcggtagcctgcttttctcttccatatcctattctttgaacaatccattggataaagtagccggtgccatttttcgttatcaacatggcctctcaaacagtagaagccggtgattctgctttgcataagtttcaggttccaactgttgtcctgccacttcacaacagcattcccccggagctgctacctcggtatgacccaatctacgtcgcatactataatgcatttaatgccgggcgactgcatacgcacgagatcccgattgaagagttccgcaagaaccctgcccgttataccatttcctatggccgagctcccggccctgatatttatcgcatcacagaacagaaatgtcctgtccatggcggtgaaatcaccatacggatatttgagccagcatcccagcttgacggacagggccagccgaagaagagagcagcctatgtcaacttccatggcggtggatgggtgtttggtggactagcttacgaccacgatttctgcaagcgagttgtccatggccttgatggggaccttgtcgcatttgacgtggattaccgactggcccccgagcataagtatcctattcctgtggatgattgttggacggctttcaaatgggtaggagtctcccgggccaagattttagatataaaccaggtgctaacgaggcaacatctagattcgctcccacaaagcgaccgagttcaatctagacccagataggttcgcagtgggcggcgtgtcagctggaggccagctttcggccgtcatcagccatctctgccgcgatgcagacatccctctgcgcttgcaagtcttgactgtgccggtgacagacttgcaccgggtttttactcccgaaggtgagtttgactacgaaggctgtccatatgaatcataccgagagatggagtttgcgccagcgctaccagcagcgcgcatggcatatttccaccgacaatttctaggagttcctcgaccggcggactctgacgaggtaagttccgacatgaacttgaactaattgaaaatgggatgctcatttgtctaggattggaagatatcgcccattctcgcaccgaacttccggaacttggcccctgcgttggtgtctacggcggaattggacccgctgcgcgatgaaggagaggcgtatgcggctaagcttcgagctgctggggtatctgtagaagtagatcgaattgcaggtgttccacatttggtcgctggactcgacggaattctggagggaggtcagcgatataacgagaaggttattgcgacgatgaagctgcggcttaagggatgataaataaataccataccaaaccggataatacacgatatgaccgaatattacgggcctcactgccgagcaacccgtttcccttcggtcctgccgataccgggaaatgccggcattgcgacttttctttaaaggagacccaatcctcgattccactctcatagaagcttcagaagcttagtgggaacctttgtatatcctctttcgtacagctacaaattcaattgtcacacaatgaattctacttcctcgcgagccgcggtgcgctctatggccaccctgacacatgcggccagagccacccccgcagctcgcagcgttctgtcgccctttgctacccggtctctgagctctaatacccggcaattcgttcagttcccccgccttcaatccttgaacactttctccaacaagcgttcttttggaactacagtcagaatggtatgctgcttagagggcgcggtagacaagcagacaaactgatgtgtgtgacctagtctgttgaccctcgtaccgagagcgatgcctttggtgaaatccaggtgagtgatattggcgcagcaatggtgccgcacagaactaatggggatttcaataggtccccggagacaagtactggggtgcgcagacccagcggtaagacgacccgtgaaatcgatatgttacaagggaagaaacgaacaaggtcgctgatggatgcagctccctgaaaaacttcgacatcaaccagccccaggaccgcatgcccgccccgttgatcaaggccttcggtatcctgaagggtgctgctgctgaagtgaacatgaagtatggccttggtatgtgaagctttgcgtaatcagatatcgtcaggttattgacttgcataagaccccaagattggcgaggctatcaagcaggccgctgctgaggtcgccgagggtaagttgctggaccacttccctttggtcgtctggcagactggttccggcactcagtccaacatgaactccaacgaagtcatctccaaccgtgctattgagatcctcggtggcaccatgggctccaagaagcccgtccaccccaacgaccacgttaacatgtccgcctcctctaacgactccttccccactgttatgcatatcgctgccgttgttgagctcgagcagtcccttctgcctgccctcaaggaactccgtgatgccctccaggtgaaggtcgacaagttccaacatattatcaaaattggtcgtacccacttgcaggacgccactccccttactcttggccaggagttctctggctacgtcgcccagctcgaccgtaacatcgagcgtgtccagtcttctctccctcacctgcgcctcttggctcagggcggtactgctgtcggcactggtctcaacaccttcaagggcttcgatgaggccgtcgctgccgagatcaccaagctgactggcaccgagttcaagaccgcccccaacaagttcgaggtgctagctgcccacgattccatcatcgaggcctccggctccctgaacaccctggccgcctccctgtttaagatcgcccaggatgtgcgatacctgggctctggccctcgctgtggcctgggcgagctaagcctgcccgagaacgagcccggatcttctatcatgcccggaaaggtcaaccccacccaatgcgagtccctcaccatgatctgcgctcaggttatgggtaatcacgtcgctgctaccatcggtggcatgaacggccagttcgagcttaacgtcttcaagcccctgatgatcgccaacctgctccacagcgtacgcatcctctctgatggcatgcacagcttccgtatccacttggtggagggtcttgaggccaacgagggacggattaactcccttctccacgagaggtatgctcttctgatccccccccttacttttgatggcaaattctaactgtatgatagtctgatgcttgtgacttgcctgaaccctgtaattggttacgacatggcctccaaggtggccaagaacgctcacaagaagaaccttactctgaaggagagtgctatggagctcaaggctctcagctccgaggagttcgacaagcatgtccgccccgagctgatgctggctcccaaggagttgtagacgaacagcagtgctgtcctgtgacattatagaccatttccgatagcatgtgtatactgaaaagaatttatgtttgatcgctttgtgttgtgatgcgatacactttttttgtatgttgtagatcctcaactttctttggggttataaatagcacgatcgcgaagccgatcaagaacactagtaaatcagagttgccgagatcggtttaatactagtatatccaataaccctaggagtttttcaatgcagaaataagcagattatgctaaaaaaaaccagacagaaagacaaaagaatccactatattatacgaagtatgtggtattaatagaaaagcccccttagtggcggtgtctcacctgcagggctgtacggagaacggagtacctgaacccttcgaagtcaagtacttatttcccatcttgaaaagttcgtcttttcacttcgaaactcttatatctctcctcagttatatcaaagttcacctcagcacattaacttcctcaattccaagtccgccgatctcccccggcccctgataaacaaccgccctcaaccctcaaccctcaaccctcaaccctccaaactcttcaactttcaacattcccactctccaactctcactgcaaaaatgaccgcacacgcccttccaagcaccacaacctccgaggccgtaaagccaatcatgagctcaaccgttacctcagtggacgagacggtcaccgacggtcccctcttcccctccaccctcatctcccctgaagtgatctccctcttgccaacagactacacaatccggccaatgcgccgctcggactactctcgcggctatctggacgtgttgcgcgtgctgacaactgttggcgagatcaccgaggaggcatggaaccagcggtacgattggattacctcgcgcaatgatgagtactacatgctcgtggtctgtgatggtgcagaccgagtcgtcgggactggcagtctgattgttgagcgcaagttcatccattcgctcggtatggtcgggcacattgaggacatcgccgttgagaaaaatcagcagggcaagaagcttggtttgagaattatccaggctttggattttgttgctgcccatgttggctgctacaaggtatgtgtttttttatctcttacgtctatacttatcattgctgacttgttgtttacagagcattcttgactgttccgaagtcaatgagggtttctatgtcaagtgcggcttcaagcgcgctggcctcgagatggcgcactattactgagtgtttcttgatacaagttttttttttatttctcccgccttgtggttcacgccggttgtttgatatagcgtttaggtcgttttgtccgaggattcggggagtcgccgttgcccacgagaaacatgcgcaaaccatgcgttggttgcatttgaaccccaattgattgtcattggtatggcccttggcacacaacaaggcccaattgggccatttgtaggattttgcatccaccctctactattggcaactcaattgcgcaccgtgaaagtcctaaggctggggaatgcttggtctaccaatcgtgatcatgatggtgcttctgccattgcggcgatccccgtcttagcttgtaacactactgatgggtttgtattatctgctttctctcgagaatttgaaattaatgcattgcggggatggagacctagatggtctgaagcatagatgtgcgtgaaacatgacaattatatatcattgttatccaacttgaaaaattattgtctggtcagaaatagaaggttcggtttaactatttgaaactaaacactgtttgtttcattcttgctttgtctccaggcaccctatgttataccttccgtatattcaacgcgaaaattttaggacaaaacaaaataagaaattcaatttagatctggaggtagaatctggattacttcgttgacatccgacagggatacatatctagcaacccatgagtaggcctggcagacatgataccccaggggaaaagcaagacactttccattgctggagactggataagaatataattttaatactcgcatgggattcattttttgattcctttgttcccatttttctgcatgaaattgtattgcataaagtatttccagaaacaaggtcaaggcccaaggccagtcctcacagacagtactccagctccgatgcccgtaagttccatcatatcgcaaccatcacagcactgctcctttccgaacacctccattcccaactatttcataaagaaatttagcgggacttggcggcgaccttgggagcagagcccttagcaccctgcttgctctggatgcgctgggcaccgcccttagaggcggcgatcttagccttctcggccttcttggcgctggcggaagcagccttcttctccttggcgtccttgatggcctgcttgcgagcagcctcacgagcctcggggcgttgggagcggcgctccttaatcacatcgagggaagcaccgacgatgccacgctggttcttgacaacacggcgggtgcgcttcttggcgacctcctatatatacaaaaagataacccggtcagcaatctgcagtcgcattctccatcatttgatccgaataatggtggtgacgtgataattcctgctcttgctccgtttcatggtttgtgcgtcaccattcaattcggcctttgtccctccacacaatctaacaataatccaaggagaggggcgaccgacctcagagatacccttgcggtgctggcgacggaagagaacagtccatgcgatgcggcgggggttcttgcgctgaaggaaaagggactcggactttccacgctggaagcggaagatcttgctgtcgccacggacgaatagcttgccctaaacattgaacatcaaagattagcttctagcggcaataagaaaacggcaaaattcatgtgcggtagttcggcaagatggagagcgacagttttgacgtcgaagagtgaatgtcgaatccgtgatgccgttgttccctcgcacaagaattcccccccccaaaagcgacgacgggatttgcaaacgcaccttgccagggtagatcttctggccgctgaaggcgtcgtcgtaagtacgcatcttgacggatggagatgcgctgacgggggtcggttggcgttgagtggttgtcgtaaatcgtggatcgcggtgatgttactgacccaattgtggtgcgggtgctcgctaaagtgcgacacgtgactacctctgccctttccgggtcgacttatcgataaggtcacatgatatgtctcttttttctagtacttcgattgtatatgatctctgatcagaatagttgcataatgtagttaactagttaactagttaattcgaatcgtattacatatgcttcaatttatgccttattaagagtgcaggtggaaaaaaatacatgaaaagacatgaaaatttcaaatttcaaatttcaactaacaaaaagcgcaaggaatttggaattttcacagataaactactcctggccctcgatgaagctgaatttccttcgagtctggactatagatgtggctggaaacttttgtggtagagcggctcaagcgaagtatgtgtataccgtctacgcctatacagctggagtaagtatcttcttcaatagtcctatcagagttcgatattagaaatggatgaagttgacatatatataattctcaaggtgaggatcacggctgtgcaacaagcgatatagtgatcagtacactgcgaggactgtaagtgaccggactacattagatgtatgatagcggatgcgttaagaatggccgatggaagtcaaacacgcgggcgaggttgacggtctgctagaaaaagccagaataacttgagacaagattaatggaaggagcagataatgtgatcctactcagagcaacagggttgcctaataacaaacgcttgtaattgaatgcctgctatcgcaaatagaaagggttatctgcacttcatggtcacatagcaccaacggacttagtccatagcatgtgtccgagtccattcctttgccgtttggatcgcagcaggctcatcgtccttccatctctgagcaacatcgttggcgagcgggtcatcgggattcggggctccgagcagtgcctgaatagatagtagaatcgtacgaatctggagagctggagaccaattatctggaaaaaaagagaaacactattagacatttccagtttgagaataaatcgaattgtggcttactcttcaagacatccaaacagatgcgacccagacgatcgatgttggggtggtagatcttggtcaagaagcgaattttgggtggggtcataggatagtcgtctggcaggaagagctcaagtcggaagataccgcctgtatatgtcagtacttcaattgacaggaagattttgtaagggcgagcctaccctcatatggagattgcgcaggtccgtgaattgagacgtcgaaatagcggaggttatcgtcatggggtacagcattaatgcctggaacactgtaacccaagcaagacatgttagctgccatgcaaatgaccttttgagagagaaaagctgcttacggctctgccatcagacgttccgtctccttaatgattctcttgggtaaagccatggcgaaccggcttatcgacacgcgtatagacctgatttgaggagactgttcctaaggcagaccaggaactcgcacacttttgacgttgagtgggatcacaatatgtaatcggaaaagtcaacagagaagagtaaagcgcaagttaaccaaaaaaacaatccagatctcgacataaccggccgaggggctcctgcatggcggggttatttcgcgtcccgtatacgagatcatgtgatgtcataatcccacagcgacagccacagccacagcaccagccacgctcttgtgcttatcgcgttatcgcaactcaactctccacatgtgcagttcttcgcgacaagtcgaggatataagtctccaaccatgaaacaatgatagcgaatgccaatgtgaaagatgggaacaggtgaatcactcctaaatgcatatatcgtcttccgttggatgcatggatatacctctgactcccccgttcatgcaagatcgcggcccgacgaacaccggagattaaaagagcggcaatcacagtcaccatgtctagctcgatggaaccgaggcctctcacatcggctatggagagcccgacgtttgaagaggacagctcctttcatgtagagcaaccggtgggttctatgtcaatatccccttgtggacgcgatgtcgttttagcatccaaggagggcctacatgtcatcgacctagactcgccatattctccaccgcggtatctccctcaccacacaccatgggaggtagctgatgttcagtggtctccattcgctgcacgtgatcagtgggttgtcagtacatctaaccagaaagcgttggtctggaatttggctatgaagacatggcagaactccatcgaaattgttcttcacgcccattctcgagcaattaccgatatcaatttctcggcattccatccggatatcttagcgacgtgttccgtggacagtttcgtgcactgctgggacctacgtgctccctcgcgaccagcggtctcattctcagattggtttactggcgcaacgcaggtaaaatggaatagacaagaccctcatgtcattgcaagttcccatgaccggttccttcgaatttgggatgaccgcatgggcgcctacccaatcaaatcgatcgaagcacataacaccaagatctatggagtcgactggaatcgtgttcgacgcggtgctgtagtcacatgttccttagatagaactatcaagttctgggactacaccaacgattcagatgttcctgaaaagcaaattcacacaccattccccgtgtggcgggcacgcaatacgccgtttggatggggtatgctcgcaatgccacagagaggcaacaatgaccttcacctgtacagccggcgagccgcagaaggctcaaatccagaggacgacttaccgttggtacatagttttcccggacacaagggacaagtcaaagagttcttgtggagaccgcgcggaggtgtagcgaatggaattgaccatcgcgaatatcaacttgttacgtggggaacagacagggagcttcgtctgcataaagtcaaccctgaaattctggcgcgcgtcgggtacgaaaagggcaagtcttttatttctacgcgaactgtgacacgactcggtgccgtatatcggagtttccgcgacgtgaattcagatttggatctcgatgacgttgacgtggcttcctctgttggccaccagaaccagaatatcgcggcaggtactgggatgaacgccattactgttccgtacgctcggggttggataaagggaggccatattgatcgagttggcatgcaacccaggtcaaatttaagagccgatacaaatccaattgcttggatgcgcggtgtaaagatctcaggctgggacattgagacattaggagatgaaatcagccaggttggtgaaaagttcactaaggttgcatttgattcagttgatgtccgacaaagaaagatttccatctctctaaatgggccctggggtactgacggggcctccttgtttttgaaggttgatatcaagtttccaacgagctatcccaagacggctatcccaacctttgcattccaaaagacggcagccgtcaccgatgagtgggctgcgaagactaccgctgaattgcgtacaattgctgagacctacatgtctcggaatcgagggtgcctggaaggtgctgtgcgttatcttttaggcgaaagcagcctggaggacagcgtcgcgtggatattgggtgaaactggcgataccctcaagtcccctaacaacggtgaactggaaggtgaatccagcgacgaggatgaagtcggcatgactcagagccaagagctggggatgagttctgagctactccgccctgtcaatgccaacgtcatggtgcctgtggccaaagtatgcggggcgctttgggcaaatgacggccgcctcatttgcttcttcccgccgaaaccaaagaaggataaatcagccgagttgttcgagaacatgggcttcaaagagatgactcgttggtctcgaggcgataaagtttttgaaggcttcggccggttgcataccaactcacccggcccacgcggaatcggaacgataacgagcacagatgatggtacatcggatgattcggacgagtcatactcggatacatcgagctcttcgggctcctctgacgtcctttctgggctaccgacacctttcccagcatcccgaacatggcgcagtgccggcagctatggcattcaccggccgcgatcaacagataattctcagcggtctactggaggtggtgccacagtcaaatcagaggcaccccagaatatcgtatctattcataatctgagtgatatgttacccgtcaagcgggagttagcgagtcaataccgcatctgtggcaaagggacagatgtatgcgcccataacgcggctgttgcccttgacgctggctgctacgaattggcccaaatctggggtctaatcaagttgatattgcatgttcgaaaatgccctggcactttgcctgggtcagggctgtcgcaaaggcgtacgcgcaaaaaagcgggcagaattggtgatcttggaaaagatgggctgtatagagacttgacgggcagtgttattcgctggggtgaccaccctcttggcagtcattggcttgtccctgctcttttcgaacactttgagcgcattggggatgtgcaaatggtggcaatgctgtcgtgcgtactactggaagccaaccaagagggatatttggagaatcagcgagccaaaaagacgcctgggagacaggatttctcattagattttcctcctgtcccatccgcaatttcaaccaagccaccactcgcgacgccagcttcatctgttctcaaagaggcccaggctatgcccccgccccagacctcgacacgctcttctagtgagatctggcgtctcgattccactcccccgtattccacaggcaccacgcctccattcatgtcccgtccacgaggcatcgctgctgatcgaaaaaataccacccacaatgtgtccatggctgcatcgcctgatcaacaaacccaagcacgaagtggatctgggtttggatcggtgctggcgtcctcattatctcgttcattcacattcggaccgtcatctgcgtcaccgccgacaactagaatggacaagaaaaagccgactcctcacaacagcccagttgtggcagccggacaagtggtgagtagttctaatcttgatttgagatgcctgcaaagtttgatctgtctgacctcgactgctctctagtcacaggctcagtccgacaccgaaagcgatcaaccaacggagcctacaccaccacccgcaagattcaaggtcacatacaagaaccaaattgcatttgaaagcgacggaccagcgcaagactcttttcttgacagagatgaggaattgctgtatcgatcataccgcactgcttatgcaaacttattatcgatttgggaccttcctgtccaacaaagcgaggtgacaaagattggagctgtggctgatcgagtggacgacttgacttcaagccattactggaacagcactagctccgaagagaccgcattgcaagatccacattcgaagccaaactctcaaactcttgacttccagcgccattgcgccagctgtggccacgcgttgcagctctccgtctttaataaggaacccctagccccgaataccccctccaagcgaaatcagcgcaaaccatcaggccgccgatgccctaactgcaagccccggcagccactgccaaccaaactgccctgcgtcatctgcggcgaggtgatcaacggtatgctgattccctgtctgagctgcggacatgtgagctgtttcgactgccaccggcgatggttccttcgaccggccgacaaattcgacagctcattcgcccatccagaccagaacaagttccttccaacctgtccgacaggatgcggctgccagtgctctgaacacattgccgttgatgtccccatgcccttgttagagccggtatcatcccctggtactaaagaatacgcacccatcacccagcacagccttgtacaggcgaaacactctcatcgtcgacagtctgagcccgtcggcttggtttctaaccgaaaagaggatccgcgccccaagggcgttggccagctcgaacacgatttggatgtgtggcaggactcgtcgccgtttgcatctctggcgcgcggtcttggcggtgggctgagtcgtggtttgcggacgaaagaagatcggaagaagaacaaatctgtcgccatggaatcgaatttgaggaattcttgatttttcgaggttggcgttgaactgtgtctatgattttgcgtatatccattgcttttgggggaagactttcaactacaaacaacttaattggacaatctgatccatgtgatggcactatccatattcatccgatgtttattattgttgtatatttcgaaagttccgggtatccattctaaccttcaatccgtagtataaatcttcagtatggaggttgataatccccaggacttccgatgcaagacctacggagaacaatataatatattcctgcttccacttaagagatggtgccaactgtgtctgaatatggttggatgcttgtcaattggcttgcccatgatctagatctcgattgaggcgttaagcacggacgactaatagtccattatcaaagcagcgcaccaatcagaacgaggaggtatagttcctagctgtactgacgttgtacaacaaattaaccttaagacaactgccttttacttagataagaaacggagagagataaaagaatgacctcgtggcttcattaaaagtatttcactcttcaggtaacagagcaagcaacagggcgatctaaaaattcggaaaaccgctgaaagcagaggggagaacaatgctggatatctgctaaacacaaataccgcagtccgactccccaatcacccatgaaacaatgcgccagtccatttacccagttccagtcttaaagaagtgaatctacaactgcttgaggacagcatcggcgctggagagcacgaggctgttcttggcggcctccttggcggcgtaggtgaccttaccgtggtcgataatgatcacgtagcggtaggtgcgtccctcctcgtcagcccagccgatgctcttggagaacttggcgtcggggtcggagaggaagagctaaataaaagacaggagtcagtcaattgagtccgtgaatttttggggggaaattggtatgggtgggaagaatgatagatcacatacaatatcatctccagtgacaccgttggccttgccccaggcgctcatgacgtaggcatcgttgtaagcgaggacggcgacctggtcgacacccttggcgcgcaattcggggagcttcttgatgtactcggggacgtggttggcggagcagacgggagtgaaagcacctgtagagcgggatggcggtcagcgcgagaacttgcgcagaaggcctagagaggaaggaggaggggattgcattaaagagcggtcacgtaccgggaagagcgaagaggataaccttcttgttggcccactccttggaggcgtagtagttaatggggataccgcaagaggtgatggcaccagcctcctcagaccaggggatgtaactgttggtagtctgttaggtggagggacacaattagaggggctagctcaattactcacgagaacaccacgtcgtcggggaaggcgtcaccggacttgaaacccttagtagacattttgaggatggaattgagtgtttgagtacggaagagagagaggttaagattgtggatacaagaagaagaggggaagagaagaagtccaagtatttaatatcacggctgacacatatcggcccatcgggactaagtggggactggctctgtaccttacaagagaagtgaggtgatccgaagaagaaagataccgaaccacatggattatcaagaaagaccgtcgagactgggcgttatctgatgtatattattcatcggcgaattgggcgagagatgagtcagcctggatcattggttacggggagggaacgtgtcggctattaagataagttgcctcggatttagtattcctggctgttcctagctgttctccggggttcttggagacacaagtccatttgtgtcattggccaaaaatgaggggccgaggtgggggatgatgttatggagtgcctgaaatacaaggcataaggtgggatgataaggtcaggtgatatacatgcctcaggcctacttttgtcatcacgtcacattaatcatatcaatccattttgcgagaaattagtaaacattctggactgaattctttgcgccacattatcatacccctagctaagtgaactccgcatataccgccatttcaaattcactggtcaattcctcgaatctggcatcagcctgtgatataacctgagtaaacgtcgcggccgctatacccttgacccagccaatccaccagaagagattgggtcgaccggcccattgtagcgtgcccgccgaacgtttcccaggaatggcatccgcgatttcaatacggccggcatccatgtcaaccgtagagcgtagggacgcgctggttcgtcttcgaggcggggctttttggtaggagcgggcccatcagcagctcctgtagatcactcgagccaatggtctgtggttagaagatttcatcgacgctggctttggagagtatggatccaccgtccgcgagcaccatgccgaggaactttgtccagtcgcgcggtgttgaccacagaccgtggctcccagacgttagatcgcataaactcctcgagggtggtattgttcattcgtgcgatggcctcgccggcccagtcggtcccagagccatacatccagccttgtccgggctcaaagaggagtggataggtcttcatgatttcctgtggggtgtcagatgcacatcgatacttgtggcgtacataagaaaaagatttacaaagtcattgtcaaagacgctgttagtcttgccattctgtctcgcccatctcgccagcggaggatttgaatgataaccacagccactttgatggctcattagcaatcgaagtgtaatggtcttagtccggggttttatcaagcatcggccctccgaaccgacaccatacagaaccgggggagcacacagatccggaaggattggagctatatcatcatcgagggagatctgtccgcgatcgacacaaatcatgatggcgactgtggtcatgagcttggtgagagaggccattccgtataccgcgtcaaagtcaactttcgtactggaatcctgtgacaatgtgcctttggacagtgtatagagttgttcacctgtgatcgtgatcagtgagtatatccccattcgagatggaaattgtatatacgtacccttcttgttgacgactgagcatacataagaatgcatgactggctttgaatcggcaattgctcttcttactgaccgagagaacttttccatctgagatccagccgaaccactatctataccactggaaccattcataccagtggaaccgttcacgccattagacacaagagattcgtttggagattcgtgagacgtgccacccacgataaccagggctgagatttctgccgcagctgccttcatctcaagggcatcaaagatagtccctgctagactcttgggcgagcacgagggagccagcagttgcaaaaatgacatgcccacaccgaaattttggctcagccaatggatcagctcgctgccggacatactatcgagaccaaaatgagaaaatggacggctgatatcgatgtcctcgatggagatgaacatgagcttggccagccgctgtgaaacagcctctgccagtacgatgactgccttgtcgcggtcatcagaaatttcgggtatcagtaggtcatcaccactggcatcgactatcacaccaccgctgctgccggcagctttgcgcgactcgagtgttgtgactagcagcgctgagcggcgatcctgttctatgcgcgtgacctgaaccaagctgaggttgtgcttggattactcaactccagtgagaatgtgaccctgcgtgagactgtcaaagtgctttgacttgagctgcgggtgcgtgaagcggttgaagtgccggataaactctgactcttcggcttcaatcagccccgaccgcaacaggttctcggcatactcggggttgcggttcagcgtgcccacgcctttgatcggccccagtgagactgtggctgctggtaggccattgctgatgcgctgccgttctaggttatctagcaccgcgttggatgctgcatagttggactgcgagatgtgaccaacgtatgtgactgttgagctcgtcatgaagaaatcgagattcgcgttgacattaatggtggcattatgtaggtttatggcgccgtttaccttgggacgaatggcagtgttgaattgttccagagtcatagagtcaaagaaagtgcccttgataatgtcgatggggccttctccatctcggtaatatggaaagtcttatccagtctaattgggtgaattttaccttctcggatcggaggagcttcatcgcatctgccaaaagcctattttcacatgttagtgggctccatgcattatacctgaaataatgtttgggattcttgccgttcggcaattctcagtttctcctccaggacaaagttgagatcaaaggagaagaaactgatgctccgatcaaaagcattcagccccatattgcccttgtccaagacgtttccacgtccaacatcaataagccttccacatggtgctaggcattttaagctctcgtggaacccggggccagagatggttgaaaggacaacatcaataccgcgacatcgtgcctgcttcagtatttcatccttgaactctagagttcgggaccagaagatatgatttgcgggaattccgcacacagatgagatagtccttcttttgctgtgttcccactgtggcgtagatttcagcccccacgcactcggcatattggatggccgcaagccccaaaccaccggtggcagcctgaatcaacactgtttcgttgacttctaaatgggctagatagtctagcgcatatattgcagtcccacaggcaattcccacggtagccatctctacaaggtcggcatcattttcgagtttgaggcacttctgtaccgggctgcgaaggaaggtgtcgtagtatccgcgctccaagcatatgaccttgttgccaggctggaggtgagtgacgtcctctccaaccctagaaataataccagtgctctcgttgctcgacttgacactttcaaagttgcccattgcaatgacatagtcctattatggtaattagtcgccttgaatcctgcgttgcacggtagggatatcgtgaacgaaccttcatattcccttcatattcaatcccacagccttcacctcaatctcaacctcatcgacgtcaagtgcaatgtcacatgttggtttttctcggaaatacagagtatccaaaagacctggagtctctagtgccacctggacattaccgaaagttggaaaatcttgttcatctctccctgttcccgtgtctagagtgaactcttcgttcagctccatatcggggatgacacgatatagatgataccgtccttgaggatgaagtccgtctcacacgtcgctctgttggcggctgtgacaactgtagtccagacatccgtaataggcttagcgagatcaaatgacctagcggagtcaaaccttggtccatgaaggttatacatgtagctcacgcggttgctcactgttgtcctgcccattcctagaatggccacaccttcaatactctcaggctctttgaatgcaagtgtctcatagtcactggcaaagttgcccacatacacaccagtcatgatgctgtaaatatcttcgagcgttatgcctccggattcaagacatttgaaacagcactcgtcatgccaaaaaacccaccatcgaaatcctccagtttattggaaatacaataaccctctgtgtaccgcatattccctgggcgtaccttttggtgattgtagaaagcatcggcgttgaaagggtttcttgggaaagggccgcgtacgagtttctggctcaccaaaagatcccagaaagatttggggtcctggacgtcaccaggaagtcgacatgctgatgaaaagagataagtgtcagttgagaatggatatgaggtatgaaaagcgagacaggggcgctagaagagcaagggggcaacaggatagtaacaatatgatgacttgcccattccaacaatggatctcatttattttcggctgccgtgccgccttccgggattttctcgccacgaagacgctaaacgaacaacgtggtatttggcccaacaggatccgtccggccttgctttccaaactagtatgcaaactcgtcgtcagccaagaaagctttctctgggccgctctaggcgtccccaagaaccagctcgccatgattgaaagcgaagctgtcagtggccctaacccgacagatcgcaagacccgctctcacgcgatatggaaatacatggttgacacctttgatccagtcgccgatcagacgcatatcggtgctgacaatccctcctatcaggtctgcatgaccggtgccttcacccgcaggtgtcacccggattatctccctaggaaggcgcatgccaagctctccagcccaggtgctctagacggtctgcgaatccacacagacgatgtcaacgaggtccttaattacataacccccgacactgaccgtcgccgttgtcatggacagcatagactggttcgacccgagcgccgcagccgcagcctctcagagtactaaattgaatcgcagtctaaagatgggtgatcgtgtaattctgcgctcctcggcactcgtcctttggtatatgaagacgttcgaggcccacggcttttcccccaaacgagttggtgcgcgtataagtggcgcctgcatcgaccgcgtcaacatgtatgcgtcatgttggatctgcacgaaggtggagaatttgggctcgtcgctcgagatagaccgcatgcatggcctgaaaattaggagcatgtctactgaggtctgaaatatgtagttcacatacctagaagtgtcagataacgctagcgttgcggaacgggccgaccccgctttaccatcgtcagggggaatagggtgttttttattacaatgcatgaccgtatacggagtactagattggtaacaatctttcattgaactaattcctgtctaggaactatggcgacaagaggtctcaaaagaatcattatatgacggcaactacaaatagtcaactagttaaagcgtatgcttaaggcagaaattgcaaggcacacccctactttcatttatccttcctttcttctagtagtcatcgcacaatgttctcctctccagcaccctattactcccggtgaaagactttgctttcgcagacagggctgtcggcgcccctgctgcttccgcttcaaccccccccctctcttcattagctagttaactaaatggtctccttctccttttggcaaattttattttagttcattttcctaaacactaaaagtataatgtagtacgtacatatgcatagcctgttggcaaatgacttgcgacgttactacatgtatgtaggagccaaacacatctagatcaacaccaataaaatctgctcctagcatccgtgtctactgtcagattagaggccttagctatgtagccatctgtcaataaattccctagtgatcgttgtgcgtcaagagatgggtaagctgactgcagcgggaaggcttcttggcgggttcagccaaattttggggcgacaaggggcattggcaatgtctcggatctcccgtggccgtcttcttgaggtccacagttgctgccagtgctggaatatcattggtggcctgtcaggcaaaactacgccaagtagatcggccccgggcccgtacgtgcctcttaacggttttcggacaaagatcaacaacaatctcccgtggagcgggtttggggatcgggcttggggaccggatttcggagttgaagtgtaacttccatacccatgccctaatgtcactgtgatttcacgacatatccataccatgacaggaggagttttccgtcgagggaaaagcgatggaaaagtcatctccgacgaccgaaccaactgtacgagggacccttcccgcagcagcagaagaacagcaccaagaacacgaagaagaaccagcgcaatttaataatgccaatttcactccaaagaaaacatggcgcttctgggccgtgttcccagcactatgcgcgacaactttcctctcggccctcgatacatccattctctcaaccgctcttcccacaatcgcccttgacattggtgctggcgaatcgtacatgtggattacgaactcatacatcctatcatcgaccgttgtcctaccattgttcggtcagacggcaaatatcttcggtcggcgatggatgctgatcatctcggttgtcatatttgccttagggagtggcatggctggtggtgcgaagaacatcggacttcttattgcgggacgaacaatccaaggcatcggtggcggtggtatcaataccctcgtggatatcgtcatttgtgacctggtccccctccgccagcgaggtaaatatgtcgcgctcatggcagccgtgtgggcagttggaacggtgataggccccgttctgggcggcgttttcgcccagtatgtctcatggcgttgggtcttctacataaacctgccactttgtgcagcgtcacttctattgttagtcctgttccttcgagtcacacacccgcccagcagtggtaccgtgtggctccagctaaagcgcgtggacctcgttgggaattccatccttacagctgccgttatctcaattttgctcgccctcacttgggctggaacaacatacacttggtcttcgtggcgagttctcttacctcttatcctagggctcggggggctctttcttttttacggccatcaaatgtcacggttttgtgctgagccctcgattccgctccagttgttctcaagcggaactgggacatgcgcactgtggattgcttttcttcagtctgtcctgctgtactgggtcggatatttcctgccagtctacttccaggctatccgtagctcgactgccacagaatccgggctatacgtgcttcctattactgccgcaattgcgcctttcggaatcatcacaggagtgatcatcgccatgactggcaaataccgcgtcttccacttcctgggctatatattccttactcttgcgagtggcctcttttcgctcctaggtgaccactcacctgctcgcgactgggctggcttccagattctgttcggggctggttctggtatgattttctctagcaccctacctccgattcaggcatcgctgcccgagtctgacgtggccaccgcaacctccacctgggcatttatgcgcagctttggttgtatatggggtattgttgtcccaaccaccatcttcaatacacgtgtccaggagctgctgtatcgtgtcagtgatgtgtctctgcgtgcaaagcttgccaatggcggtgcatatgccatggccagtgaagggttgatgcgtactttgcacaataccccgaaccttatggcggaagtgctcagtgtttatcaagatagtttgaaatgggtttggtggatttcgattccgtttggtggtatcgggttgcttctttgtatacccattaagcagctggagctcacggaggatttgcacacagagtttggattacccagcattgcaataagtagggaagggtgaaactggtaatttacttttactatagatatttggctccaaggttttgatgttcgtggtctcaagatttggtggattgcgattgcaaatagtgtatttcttttcttactggatataacgtttaatatgtatattatattggaggctgctctcgagttcaatcccaatgatcgaagcagtaatcccgacatccagttacccattccggttgacccccagaatagaaggtcaatgccttgtatcattaacatggggtgttgtctccatcaagcgagccaaagtaacagcttcccgaagcgcccgtccaacatgcccacgcacaccagcctcttccatcaccatcaacccaccaattgtgcagccctccgaggacgtcccttgatccttcaacagagcggggtggatgccactctgaagcatggttgccgtcccttgcatcgactgaaagatcatggtatgagccaggtcccgtggcataccaaccgccactgcggcatcaatcattgcgtcgcaaataacagcgaaaaaggctggcgtcgagcccccgacagcggtagtagcattcatcaacctcgggtcaacgtgtactgccttaccaatttgctcgaagatcgtcgtcgttatctggagatatcgctccggcaatgcaggctccgatgtttcaatagccgtaagtgactgagatacttgggctgcgatgttcggcaacgtgcgcaccacccaggctctaccagctgtgttatcgttggtggttgggctgccgtatattgtgatttcgagcttttgtcttgtccagccggctgcaatgctgatgataagcttgtcagtcaaggcttcgcggagcccaggctgcaccaggatggcctcgatatcggcagggtctgcgcctagaattataacatcggcagtttgtacagcctgtacgttgttgccgcgagaaatgcttattttgtccaaagactcggcgaatcgttcggatagtcttttctccgagtttgcactgcgcacgcatgcagtgtatcgagcaaatggtaaatctttagacttctctgtgggtgcattaaccaagccgtctaggatggcaatgcccaggttgcctagacacattagtcgacgtactttaccctatggttgcacactcaccacagcctagaatgcaaagggttccttgttgaatgtccattgtttgaatcaaccgaagaaaatattagaagggaacaaaagcaaacgcgaacttggaattttgaagatcggggacgcttccgagtgtggagaaatccgtaccccgccccaatcgaatccgatgagcttcatgaggttcgggtttttaagatatttagtgcttgttcttggaaagctatgcttatttgcatttgtttctcctacactgaccttgacgcggtagctgaatacattagttagccttggaagtgactacaagtgttgttagtaccatccttctatgaattctgcggttgaaaacttcgagaactcaaaataagcattcagtccataggttataggactcataggaatcatacaagttatagaaaggcataattggagaaacatcgggagtctccccgattccaagtttcccctcagctcttatcggggcacttttctccaactccgcataatataactcttttgggggaaatgcggggagaatactatatcagccgaacaatagcccacgggagatgcagttatttacttcatcatggtttcgacagattctattattgttgtcggcgctggtgcttgcggcctctcggtagcactgcatctctccctacgaggctacacaagtgtctcggtattcgcagaagatgattatatccctttcggagacttgacaaatgtagcgtgcccctaaaagctgtttattttccataacacaaagagagaaagaaaaaaaaatagaataattactgatggctcgattgaaatataggtctatcgtgcagcacaaattgcaggcgtgcgatttttcctgggacaacaaattgaccaaatagtctacgtgagcacgttgaccgggaaaaagagcgctggtattcgcatgaggaatgccggatttcatccctcgtcgctcatcattgtcgaaacgggggctagggatggcgattcgtccgaaattggccagttgcatcctgatcccttggccatacccctttcttgctataccaacaccgacccaaatttcgtcgtcgaatacgtgccagaagtatcttcttcggttatcctgttgtccaaaaatttggtacaaacctctaagatgtctttggtgggaccactggtcgtagatctcttagagacaacgggtggtcaacaaactgcagtgcaggttcagaaagaatcggggacttcacttcaacccttatctaggctgtgagagagactcatcaaggatggaaatacaaatcgatatattcacatcgcccaataattcccggttctcgagaccgactgcgatgtacgaacgacctatgtctaaacatacaaaccttcattatcttatttacaactactctgttcttcaagagtaaggcagctgcaatttatttatgaatcggttgaaacactagatgtcaaactatgaagtcaacgagtcaatattgtaggtcgtcgacgaggtctatcaacccgctcggggtcaaccaattcaggagctcctggaatcaacacagcccaaccaagacagggacgacaaagacccatcgcaaaagcctccgtgatacggagaactggacgtgggttagggcaaggtactcgtctctcacgggcattcgcttctctacagcgctcgatccacactgcttctgtgtgcccacagccactgataccgcagtggccacgataccatttatatcgtactttgcacatggggggtgatgaattcttcaaaaagtagagctctggggtaagtactcgcgatactagccttgggtggagagagttgatagaatatgggaggcttggaagaaaatatacatatttgtagaatctccaaaaagccctgggcccaatgaaatgaataacatcgcattaaaatttcttttatcttgcttttccttgtctaagacaaagctaataaggtgctatgatgattgaacaatgcattgcattggttgatatctttgttccaaatatgaaccataccctagtttccacttgattttcactccattctgagctaaaatctcatgttattgactattcaccctactcatgttccaatatcgttgcagaacaccaatatttccaccatcttcatcctgatctcgcagggccaagtcgatttccgatcgagtcggttatccgcaagttgcatgttgactttttgttgaccgcagaagccgtatgccactagtcatctttgtagaatatagcgactcatcctgatgtcagattttatcggtgacacaacagtggagatgtattggtccgatctgactgccactccgacagttcatttgacgctatggcttggcgctgctagaagaatcataaggtcactagatatcaaaatgtagttgtctaaatactgtctttgtaatttaatatctactgttatttcacctcaaatgaatcatcgcttgaaattataataattctcgtacatagtggtgttgggttgtggccagaaacagatatatattcctcatatatacaacaacaattaatctaacatgatagcttgcttcttgatcattaatattgatattgatttctatcgaacagacctatataagataccacaagtcacaagtatacatatttcagttaccaggtccgtcgagtacgatatctactgccggtcatatggctaggaatttgttggtcaaatcactgtagaacctccgcttgaaaccgaatctgttgtatgaattaggtaatcactattggcacagtagaaagatccttcattggccggtcgatcgttagacgttgtacagccttacgtggacatgactaaagccgtctacgggtcccaacctggcttggaagcggttaagcttctcaacttcgcaatctgacctgaagacaaatttgatttcatatcccctgaaatacccaccatggcaaatctcagacctccattcaccgaggagacagcgcagaaaaaagtcaaagcagcacaggatatgtggaatacgaagtaagtctcggaatttttcatctctatggccatgttcgaaagaagggtgaaggcttcatcccttgcattcttgccgacttgtattgtttgtccgtgcagatcgccctggacacatgcaacatgcctccgacggggaggatttctcttgtgctgttgagatgatggactattattatttgattgtgccaaaatagatgacgttagtgatgtcatctcccgttctgactatatgcgattagggaccctgcccgagtcgctcagggatacaccccaacgtgcatatggcgtgttcgagactcattctttaccgggacagaatctattgtggcgttcttgcaagcgaaatggaaacgcgagcgtagttacagacttcgaaaggaactcttcgctttccgggatgatcgcatcgccgtgcagttctggtatgagtttcaggatgtggaagatgagatgcgctggaaacggtgctatggattggaggattggacttttgatgagacagggaagatgcgcaaacgtatgatgagtggaaatgatgttctcatcggaccggaaggtaatggcgaggggcggtggtttgcagacgagcttgacgtgaacgatgtacatattagtgagcagcattggtgatatcacgatgcagatctgaatagacccgaggatgtgattgttctactattactgcggagctctataaaatctatataactaagaaggaggatatatatgtgcaactttatttggactcttaatttggccctaagaaccggatactagaacgtgcaaagcttagggatatggcatgctcaacacagatagacccctgtacagataagatggttaatagccctgggggttgaaatttgatttgttattatcccccttccttgcgggaatgccatatcgcccggacgatcgcaattgatgttgacaatgagagcacgatatgagtttgaattgtgagatacaaaattatttgagtcaggacctgagatatttcctttgaaaaaaagagcaacgaatccattgatcaaggcgctagtcccgagagcggagcagtgtgaagtgtgaatagtgacaggaatttttaatggttctgcctcgccacgacgctgatcgatcaaatctcatgataacaggcaaatatgcctacatggagtcaagcgaatacatcgtacccagtaaacaacaatagagggtgctaatgacattccgatgggaaggaaggaatctctcattccagtccagcccaagcatgcaagccaacctcttgcccttcatgaatattgacagttccaaactttttaccctccgtcttgtgtttttatctctgtcgcttaatatcctttctcttcttttttcccgctgcatctccgtcgatgatgtggtgttgaccagcccttgtcactctttagttttcttctcttccttctttcccagaatagtctggagccgatctttacacataacgtctttttgttgactcccagaaagagctgtatttttgcatttgatctatttttgttgtgcgttgggtattggtctccacagatgattgttgacgttgaacggtctgctaataggcgtctagaatcacgactaatctctaaacttcaagaagacgtggaaaacacatgcacgacttgcagagcctctacgatggatcagataatgtcagacgttaatgactctcagcggaggcgtcagcccttgagagacgcgtcgagtcggataaaccattccaagtcgccaaatgtcgtcgagacaccgcgcctgaggatcgaggaatccgagcagctaaagagtccagaccgggtgtccttccttatgaccccgaccccgcaaagaaacaaggaaaatgaacggctctccgtggccatcgactcgcagcctgactcagcccggaactccatcatgtctgcagcatccattttgtcgaccaaaggtaagaggaaaacacatgtgggaccatggcagctgggacgaacactggggaagggagccactgggcgggttagactggcaaagcatgctgttactggacacacagccgctatcaaaatcgtttcgaagaagtcagctgctatggttcagagtgagagtatcgcggcaatggaccgtaatatggggaacttccctaccaatgcggccacccgacaaatgccctgtggaattgaacgcgaagtggtcatcatgaagttgattgaacatccgaatgtgatcagcctctatgatgtttgggaaaatcgaggagaattgtttgtgcacccaacctttgaaattgagaatacactaacgcaatagataggtaccttgtccttgaacacgtcgagggtggagagttgttcgattatgtatccaacaatggaccattgccggaagaagaggccgtacgactattccgacagataattgcggcccttgggtattgtcatcgtttcaatatctgccaccgggatttgaaacccgaaaacattttactcgatgcaaaccataatgtcaagctcgctgattttggcatggcggcactgcaacctgctggccactggctgaatacttcatgtggtagccctcattatgcagcaccagaaatcatttatggccgcaaataccgtggcgacagagctgacatgtggagctgcggtatcatcttgtatgctcttctgactggttacttgcctttcgatggaggggatctgggaagcaccctgcggcttgtgaagaaaggagactacgagatcccttccgagttgagtgatgaagcagccgatctcatccagcgtattcttcaaaagcgcccagaagatcggatatccatgcaaaacatttggttgcatccgttactaactaaatatgaaaagcttcacaatgcgatgattgatcactacgtcggtcctcctcctgccctgtcggtgaaggactgcggtcaaaccctgtcctgtcagcaggacatcgatctcgatatccttcgcaatttgcagactttgtggcatgatgtcaaggcagacgagctaattcaaagacttctttgcatcgagtaagtaatatctggtagatatgagaaataacttgcgtgacgctaataaatccccacagaccaacgcatgagcgaatgttctacaatgctttggcaagatttcgtgatgagcagctggagaactatcaaggacagcctctagagtgctcagctagtgactatcaccacatatctcgcactggcggtagaattcgtcgaggccgcagccaaacgggtcagggtagctccaagcatcgctctcacttcccatctgttaaagagttccctcgtcgcctcagctccttcaaggagccaatgtcccccgggacggtggcgagctatgacccataccggtcacccaagcatagtgacacagcatccgaagcacagtatgcccatgttaccgtccgccgagagccctcagatcaatgccaagctattctatcgtcgccaagggtgaatcctcctgcttccattgcagaggagcaagagccagaagaatcagatcggccggatggctcgccgctcacggttctccagaagcgaaagcagggacctagctctatgaagtcattcgtctcttccagggtacctcattctagctcccgcgcgccgggattgtcgacgcactcgatgagctatcgtcgcaatgtttctttccaccacgctcgcaaccgctctcatggatctgcatctgctaaactcaagaaaagaaagattgtctcaccgaatcagccaaatgagatcaagcggtcaccgagtacctgcagcttacaacttatggcagatggcctcgatatcccggatatgccaagcagcccatccctgccagcacagccaaccatggtgcgagggaatggcccaaaggtcaagagcttgggacaagtcagaaaggttcgtgatacagactacacatggagggaggacacccggaaggtctcccatgagctcagccagatctgcgaggaggcattcaatggaagctctgccacaaccattcgcactacgagcggtggatccggttacgaaacaccgggaactccagtctcaatggcaagccctgagcaagttcagcctaattcgacgaccctggcgcctaacacttccaaggagtcatccggaccctacaatattaaagagcttatcgagacacgccaaaagctctttgagcacggccgggaccgaaaagacaacgttcctgcttatctttctggtgtcataactcatctagatcgcttgatcgaagaagaccaggtccagaatggtgcacggaaaccgttggatgtagcatccttcaaagatcctttcgtcacttcaccaaacgagggcttcccccctgttaccaacgataatcgcgcaagccctttccgcgcactaagccagattagccctcgacggcagcaaaagccacggacttcgctcgctacatctcagggcggcgatgtgaaggccaccatccggatggtaccacacagctcactgccctccatggaagaagttaagcctttgactattcggaagaagaactccagcaagttcgcttcttccgatgttcatgaatttgctatggttgattctgcgggtggcgatcggaacctttccattggatcgcgacatgctggtcaacctagtgggctggctcccattgaagaagttccgctatcccctaaaaaaaccacaccccatgcccaggaaggaaagaaatggtcatggtttaagcctcgccctcagggctcttacaatcctcctgctctcccacccaaggacagccatctcatcattcctagtgggggcacaactgtgcacaatgcaattaccctcgagcctgcgtttccccccaagacacaaagcccacagcaacttccccgacgaaaggcatctatggatcgctttggcggtggctttttgaagaaacttctgactaagaagtcccctcagaatatggaagaacctcctgctagtgagtgcaacatcggcttcttttgcatcatatactaaccaatctatagacaatgaaaaagaccctcaaaccacgccaaccaaggacaatcgttattcttccctgatgtgcaagggtctcgcagacaccgacagttccgttgaagcggatgatccgccaaacccattccccaacaagcgccgctcagttgccaaccacaactggtttgcccgggttttccagatcaagcctgctacccacgtcattgcactcaacacgtccaaggttaagggacgcaaggaactctacaaactccttcgcgagtggcgggattttggcatggaggatgtgtacctggacaagactaacggcatcgttcacggtcgtgtcagcgaagcaaattgtaagtcactcatttcatccgatccaatacttgtgctaattatcccctagtcctccaacttcgggaggttgagttcactgctgaattctacactgtccttgagcacggccaccaagccaacctcagcctggttcgctttaaacaggagcgtggagccgcatcgtcttttaacaaggtcgttgagacagtgcagagcacactgatgcgccgtggcatggttgttgaagacccatttcgtgcaaagaagatgtccagcgttctggattccgtccctaaccacaaataaactatttcacgactcattttctggataacccctcgatcccactatgaaggatcgccttcaaatactgatagccaaccatcgtctttcggttctcaccactacgtccgcaaaccatcccactggcatgctgcgttccagccctgcaaaagcactttccttgcatctcctattgtccgcccgttcagatccacactcgtttttgtctcggacaagacccagaaacctcacaggcctacctagtattgccggccacatccatagtttcatttcattttgtacccatcgatcatttccatgtcttccctttctctacttgttaattatccatttatttccgcttgtgtgtcacttctgggttctacccatttgtcaattccaccaatcttctaatcgatcgggtttcacctcttcattccgcgtttttgcatacaatgcctaatttcagcgagtcgcccatgtcctaaggcatcaaagccaaggaaaaattccgtatatctaattagtgtcattgaagtggctggaatagtcaatgtccacacattatacattctatcctcagcgtgaacattgcccatggataggtcctttatccagattagggcaagtcacgtggtaatcactcgcatatgtacccaaatgtatgtctgcccgtgcccggtctacatcgtacatacatacgcggtctatgcaggtcgcagtatgctgaatggggtaggtgcatgatgtagcatgatgtagcatgaaaagaatgcaatactcgatctccaatatgcagccaagattcccccttcacagggacaaaccatgcagccaatagtcgcgctatctagggctgagaacccatccagctctaacactccacctagatcagaaaagaccaccctagatcagaaaagaggctaacgggaagtaagggaaacggcaccccacaacaaagagaaaactaggaaatgctctcgtccagatgggatcaattggatctgcaaagccagagaataatactcggtataattcgcatcatagaatttcatcagaaagcgctcagagatacaaggatcccaacggaaagtggaatagcacgcggcaataactgaatagcagaaagagtgatcaaacaacctccggatataagtataagcagatatttgataacgaaaagacagggaacagtaaaagaaatgagaggacaaacaaatataaaaaaagatcaaaacagttccaacgataataatcaaggcaaagggaaaatatgacacagccaacccaagtattttagtcgcataggcgagaaaacagatggccacacatacatcgtaaaagatgtaaaagagtagtaaatagacaaatgccttcccagtaatgtaaaatggaaagaagaaagtagaaagaagaaaagacaaagctgacaacagtgaaaaacgcgatgagtgaaaacgagacaaagtgcaaaaaaaagatagccacccgaaattcaaataacaatgcggataatatctgcagcctcgtagttgtgaaatgaattccacggaaaagacagccggagagtgtgtgattgacggtgatagtgcagaatgcgttcatgctacattttcaatcgaaactagcaaatgaactgcatgcacctgaaaatcatcccaaaccacactctcagcaaagccaatcaatccttggaattgcgattattcagatatcgaggccgagaaaaatcgaaaaggaaaaacaaagatatgggagtaaaaattcgtatgctgataagaccagagcccataggcctggaagtttcagtatcaagttcaaaatggtgctcgtgaagctcgtgggttcgcgtttcgtgaccttgtgatagatcagagagtgacgttcttgtctcgttcatcgtccaggtactcgtcattgtctggaatgtcattccgaaactccccttgcagcccaatccacaacggtccgatgagacctcaaatcttcttttcaaattgtagctctcaacacatggcacttggaccgtgtggccagcacacggcccattccgaatgttcctcattcctcaccggtcccgtaaggcattctttcgtgcatttcctagtttccaccaggatattgaatagcaacgtaggtattactattgcggaccgcggcgattcagcgcattgagcatatcactatcagtgctggagcgaccctgggaatcgccggggttcagcatatcgcgcacattcaggccacctcgttgcgagccacccggggtagaagttggcggcggtgtcactccccctggctgaggggtaccacttgacttgattggcacgctaccctgttgagccgagactgggggtatgctaccctggtgtggagtcataggcgcctggtggggctgcataggtgggaagggtgagccgtgaggtgaggaggaggggcgtgggtcgtagttataagccgacggtggtgaggtgcgccgatcgtggataggcggagggggataggcgtaagggctcggggtagtgtgagtttggtatcctggagcagatccagcgggcgtcacgggagccagattggttggatcggggtactcaaatccagaatttgagcctcggcggtgtctctgcgcatcaaaacatcagctcgagtctctctttctctccctcttaccagagggggaatggcggccttaccggatcgggcatggttgacgcaaggggcagcgggacaccatccatgaaaggtcgtccattttgatagtacatcccttggggcggtggcaaggtggtctctggagcctgcggctgctgttgagggggcagaggctgtccgtgggcaccgtacaggacaggcggcccaccgcggccccctgatccattctgtccaggtcgtaaatgagggtaggcggtgtgtgcgggcacaaaggcttgggtttgcgaagagactggggtgaacatgcagtcttggttgaatcgaacacagttactgcaccgtccatctgcggaggtctcgaaacccgagcaacgaatctatccggtcaaaattagcgcgtgatgactcgcaaatggggaggaatcccctctgtaccttccggcgccgacaataccggcatgcaatagccgttcgctgtcgcggagctgctgcttgataaggcccttgtcctgtttggggtccatatgcatcggcgcgataaggacccggcggaggtgggagacggtagggatcttgcgctccgtggatagcgttcatggcttgtgggtgcggatatcttggatccgggtactgcgccggggaatactgcgatggggcgtactgcggaggaggaggatactgcgatggcgcgtattgtgcgggagggggatattggtaggcacggtcctggtcaggtggcggagggtaggaagtcggcggatactatgaagctatcagcaaccgcagccaccacaaagtcacagcactgtaaacaggctctaagacagcacatactgggtaggaaacctgatcatccggactgttccactgggtggctctggggtctcgatgatctcttgggtctctaggatcctggcgatttggatcaccctgacggctagggtcgtgatcgttgggattgcccgacatttgtgttattggggaagagtaagacgagataagtaaaggatgcagggatgatgtcgagttggtgaaaaggggagatcgaatcacacggacaaagtgagcatagcgcagtcacgcaggggaaaggcaagaagggcagatgcaggaagatcccaaaaaaaaaaaaggaaacagaaaaaggaaatataggaaataggaaagcagaaggggaaaaaagaaaaagaaaagaaaaagaaaaagagagcctcggtgattatgacgtgagcagatataaggaattgaaaaccccacgacaagataagcagagaagagaagaagaaaaagaagctcagatcggaatgggcagagaataaagggaatgaattatttgattggaaaagcacaggggaatttttagagaacggggtggagcccgggcagcgcgggctaaagcggcgccagtgacccatagacatggaggggggattactgtacagtgacagtgtatctatacgcggaccattgtatgtaacagtttgtgtgtccatgtcgaatacatgcatggatacggagtacatcgagtaggatgaccttaccttacgctttcatttcatccagtgaaacatgggagacaagattttgaaccatggaatttaatctagggtaccagatttccgttgccatgaagccgagaacggcgaccgctcttactttctggtttcttttttcattcttttcttttatttttatttttttcaactagtagtagcgcccgagagtaactttccacgtttttcgccactctacattattacctggaacaatggttatacctccataataataatggaaacagttctacatgtttagaaagattatttcaacttccaaagttgacatcatcatcaatgtggcaggtgacctcttttgcatgggtcaatccatgcacgtcaattcctccgagtgacccttgctgcgtaacccgcccatggacgaacgaccgcctcggaccgtagtcgcacaaccgcaaccggccccgcggaaccaggatcattttccatggcgatgggctcgggtcggggcgacacattcccatgcataatcggggttggtttaattgtattttatttttattccaaccattaaatggcagtattatataccctattttttgtcttgaccaggactccctagtccatcaagtacatggaactactgcatgtaggtactactttgaaagaaaaattcaagcggtgaaagtgtggcgatcagacttcagctgagggagtggggttaagctagaccactcgccactcttcaacaacgaacggcatccataggaagacaaaggttggatatggagtatggcacaaagtctgtgtgaggaaaaaaaagtgtgacgagagcggatctgaaatgaaccagactttggagggaaagaaagagagaacgaaggggggtggagtgccctaagttcccagggctgtagcactggatccggaaagcccataatgagccaaggtaacctgcattagcgctgcgctgacagggcgggttccttgtccaagagccacaaccacgttgtacggggggggctatttagcgtacgcccccccgtcaccgccaatctctgatcaaagtcttcagcccatgtcatttgcaatatacagggaatgtgggttctgagataaagtgtgaataatagcagatggtcatagcgatggggggttaaaaaaaaaaagagcccacccgcacaaccatggattgaataatatatcgagcagattgtaataatacgagtgctctgtactattgcgcaggattaatcaatcaagtttcggggtacttgtcccacgggccgctccggccttcccgccgatctatgcatgtgtgccatctggcaaaaatacatcctcggctgttacagtacagtatttatctacgtctcgggggcacatatatcttctacataccgtgctatcatagacatgacctacttgtcttggttacttaaatatttatgatatgattacatggatacctcatgaaaataggtacatgtataaagtgctcggttttcataaatataatacactatcggtaatacacagtaatacgacgtaaaatggagtacctcccgatataagacaatcctttcaggccacgtttttcgaacccaatcgactgcattgccgtccgcgtctttccgttccccactctcaggcgtggcatgttcagctttgtccttctagtattagcgtgctctccgaagactttctaagatccacccggtccaaagctgctggccactcgatgctgtttgtcctagagacgcgctagctgtcctccaaactagcccatccgacagggactgagcgctgtttgtcgaaactgaacgcccaacgctaggggacccattccgacccggggcctttttacaggctgcgacgttccatcgtaaagtttttcttataacatttttacattatataatatttttgtactttttttggtttcaactttgcatttagtgtgatctttttctattttctatttatttattttttttcccccgaaatttctaagttttcgtcccaactccaaggtataaaaccccctccttacccacacgggagcgcgtctatcagcaaggatggagacgggtcgggcactaatagacgcagcccgcatgtctatacggtcacgggaacaccataagcaccaatatagtaatgagtaaaaaaattcacagggagggcaaggtctgtgctggggatctgacgtggcgaggggttttttttttctgcactgagccggaacaaggcagtgctttcaaagtcggtgtacagcaaactcgaacgtgcaggtcgtgtgatgggagatgcctgatgactacctgatcctgggaaaagcatatgcgagatcggcaagaagtcatcattagccgagtctttgatctttctttgctcttctgttcttcctcccttcgggtcaagcaagtttcctatttctgttattcgtgtcatattcgcatctgattggttcccaccatctatactccgtacctcatcggtcaacaggtgagccatgctccttaactctattcgggcgctattcgggagacaaagcgagtcaattccactttgctttttctggatgtggttctcgggagcgtgcgtgaagctagggacctatggcatatttaattgatgcgcaggttaactgcttcggatttgctttttcgagtccggagtccattttgcttctttaggcttgcttttgactttgcaaatctgaaaccacctaggtgtttccggctagattggattttgtattgcatacagatgcatttagggtatcaccaatctaactcaacagtaggtgtctcataaaatcgaccgactctctcaaggttttaaaggtcgatccggcgtctaccttgatccctgggtttgagttaattggctgttctaggtcaataaacatcatgcctgtcgataacaaacaagacaaattgtgacatgtgattactcctaccctagacgtttaaccccaagtgtataaatcttgtcagcccttgagcaacagaatatagttcgggaattcagattccacgaagagtatttagggaatgaatagagtataattaacatgtttaatccccgacatagagtatagacccatcatggtcttgaaccgcgaacttctagccctaaatattccttgggaagtcgaaataccttcgatatctcgcaagactttagcatattccattctctgtatatctagtgacttacttaaggccgccattcacaagctttgagtcccaagtgtttatgaaataatgtctacttattctgtgaccgaggttgtgtatgtccttatatcgatctctcaaagatcactccgtactgaaagtgggaatgccaatcttaggtctgatgcgtgaaggaccatgacaatatactggaccccgggataagaaatgctcatcgtggacagccgagtattgagttgatacatgaccatcacgacatactagactgagaccagcggaccctgcctgaaatgaacagcatcgtccgagaatcagaaatccgcagtgcataccaaacacatacagtatgcattactccgtacaatgaaacaaaacaataccacccagtcaaaaaaaaaaaaaattggagtccattccagacaaggaaggtgctcatctcaaagcccaaaatcggggacggcggagtagaactatccgggccccaatccacattgcctgcaggcccaagtttagtctagcgggcatgcccgacaacgggccgaacgcgggcgcttgcggtggcgatatcatgcgcgtcaactgagtgcttcatttaattcggagagttgtgtcttctttggtttgcataactatgttgtacattcgaaattcggttggggaggagtgtagattgcaaaaaggttaaattgtatattgcacgcgaggggctgcgaggggctgcgcagccattgggtgctggcacggctagcaggattgcgtcgaagtgtctagaactgcgtgtgtcacagtagtaatgtctcaatttggagcgttgcccgtgtactatatagtctgcagtgtgcagcagtgcggcagtgcagcaactagaggtgatatgaccgcagagccaatgttagttgcgttatttgggcccgcgccagtgttcggcctgcagtagcaatccaggaaacgcggcggggactgacgaaagaagccacgtgcaggaggcgtcaaggtgggggatgggatcccggtttcacgtcgaggacttgcgagagacaaaagacccgagctaaggcagacgttgaacgagaaaaataaaatggagaaatctgacttgtaacaaatacgaacagctctttataccccaactttcataccacacacgcatgccccgaagtaagaggcaaagcgtaaaacagaacagattgacctctctcccccctcccgaggtcccgtccaatgccaaataggcgcgggtggttctctccaatcatgtcactgatcaggcatcactacactgttgagatacgtcacctgtttgagagacgaggagcggtcagcggtcagcaatacagattctccaacataaaggttattgtcccaacagccttccgatcctgtcaaagcgggaaggggagaaaaggaaaaaagggagaaaaaaataaaagaaaaaatagggaaaaaaaagaaaaaaaaggaaacccatcgtgacaccagcgctggttcgggtgggtaaaagggacggctaacaccgccaaagcggctagcttagaagtgaaaacagactagtcaagagggggcaaaaccggcgggaaagggaaatcgggaatcgatagattggaacagggcttacgaaaggctccatgaccccaaccagagtagcaatcatctcttgggcattgtctccagtgagttcatcgtcggcaataggcttgccaatagtgaaactgcgtagtcgaagtaatttgatgttcttgttgtctgcctcgtaaccctagaaggtgtgtcagcaagggcccttccaaggttccaaagatgaatcagacgtggagcctggcgcgagagtgaaccatggaaccaaagtcgacggcgtgagaacgaatcccattccagcaagtgcgattccccattgagcgcaaactgccaaccttggaaattgcgttgctgggttccatggttgcgttccgggagtgaaaattggcctaaaacacgggttggcctttcccgtaacccccgtgcgcgtgtcttccacatctcccgaggtctcgcgtttgatggttcggagcacatgaagcactcgggacatctgaaactcttaaattctctcgaatcctcgggttccttccatctctggggtagccggggtcacgtccagcagcccgaccacggcatcgcttggtcaaccgcaaagaactggtctctatgatctcatcagaccgttgctatcaaggccaggaagatggtactggtcgatgcagacgggaatgaattccgtttcaaggaccaatcccggtcggacgatggacgcaacctcgatagcgaaccttgtgccccctgcctccaagacctccgcgtcccagccataaataataatcaaaccgctgacaatgaaaccgaagcacaagatgatgggaaggagtaaagtctgcctcaagggacaccatacttcacattgggctgagggtggaataaacaacagaacacttctcaccttgggcttcgtcttcagagcagactccctattgtgatgcgtaaaagcatccacaaccgcgtcgtcatcgtcggacgctcccttcaaaaactcacgacgcatctccggcgcgcggagtacctccttcaagccatccgagttctcgtcgatgtcctctcgcagcagtgcaagtggctcggtctcggggttccacagcccgcagcctatacacagcgtgggattagtctcaatggacaaagatcacaaaggaaggcagaatagcgatggcgacagtggaaaccagccggaggacaacctaccaacaaaacaagagtttggctggaagtggacatagtatgctgcgtatgggcctttcttgccagtccgagacctgcactatattcagtgacttggctttccaagaaattcattgaacattgacacttaccaggcagcggagaaatgcgtctatacattttgaatcagcacaagcactgctaacgagcccgcagtaccacgcaccccgccacatacgcacgcatgcgacaggcacagcgagagggacttggaggggaagatagcttaccttgtatggaagtggattcttgctgaagcgaacatccctgtggatgcggaatacctagggcaaaagtttatgagtgccgggcacaggtaaagacaggagtattcgcaagcctaccaggtccttcacaggaagttcagggatggtagcatccacctctgcaatcttcggcgtgagggactcaataaatgtctcaaagtccttctttgccgctcggtaatccggatcatgcgctacacaggtcagctagcaactcgataaccggggtatatgcgcgcttctcaccctttagccattggcggtcattgttactagctagatcgatcaagaaaagcctagtattgggatgtaaggtctcatcctggtacggggtgttgcccgcatctcgagccttgggctttgcgatgatcacttcttgcccgggctccaggcccgctctgacgccctcacgccagagctccttgcccttcatagggtcgcttccgctgctggtactctgtcgttgcttccccctcgcactgggtttcttcttcgcgtcctcgtctgtgtcggagagttgttccggctccgcatcctcggcgggggattcctcctctgcttcctcgtacacagagccagaggactcctccgcagagacatcggactccaactccggctcgtcggagtcttcttgctcaaagtacttgctcttcctgctcgtggactttgcctggctgagggacaggtcgacgtttgacttgacccgtttgacccccggttcggcggcggacagtctggctgaagcgcgtcgctttgacgccgtaggcgcttcaggcgacgtcagatcaggccgagatgaccgtcgtggcatacttagataaattcaatgaaaacgttcaaactcggtagagtctttgtccaccctttcttctctatagagtaaggagttggaaccctggtttcgtgtttggaattcaagaaaagcaagaaaagaagcaaaatactgtagatgaaagaataaaagtgataagaataaaaccagaagggtcccacaggccttaaaaaccggctgtaataaacattctccgcttttagtcccttactgttttttatttttttcctccgtttttcccccctcaagacgtatcgttggtaccttcagagacatcaatgttagttgttgagaagtgatgtgtagaaattcagatttgttggaaatggcttattgtccatgattatatattccgatctcagctggaggaactgatcggggatgagactgcgatatcggtgatggttttgggctggctacatgtagttgtgcctaacatattgctgtctttatagggggtgcacaaggtcattgacttcactaagagctctcaatatgtcccaatctcggcccttgactcagtggcagatgtactcccacgcctagtcccctttattttagctgtgtcttcgtctgtcgctctgaccatatcgtagccggtgctcgtttggtctttattaaggatcgatggctcgcagtggtaataatgagaattcggttgatagtagctgaggtattccctcagcttggtcacaagtaccccttctaggaaccgacaagtgttggtagctgtgtcgactttgctgagtgatcggaggttcttgtctgattctggtaagtccatagatagttgcaacatcgagattaagagacaggaggttatttaggaccacaataacccagaaagaacattgaagacactaatgtgctcagcgagacagcgagtaggaaataagaactagtaaagtactgacctacttcagcaattgcccggaatcaaagaggcgatgttgcaacgctctgatcaacctaacctctgtcttcttaatgtttcaatgttgatctcagccttctattggctgtcagctgtcctactatatgcatgttaccgcatagcctacaaacaagcaaaaacaacgcccgcctagagaacaaccacacaagaaaaagcaaaggagagaattcaatgtaaatgagatctagctagtcaactaactgaaaagtgacatcaaggctagaaaaacatgaacctcaaatgagtttcctcgagggagacctcacaaaccggccaagcacatcccgaaggcagcagccgtgagtgggagatctcgcgggaggaaaaagcgagacaaaggaaaataaagaaaatggcgaacgcgccagggagacaagggttttctgaataaagctggtggacgtctccatacatcacacgcagaaaagaaccgagaaaaggaaaaaccagaaacacaagatcattaccattccgatgaaccaacactcctcaagcgagaagtactggttcaggatatccaccgcgtgtggcgattacttctttgcaaatcgagcaccgcggccagcagctcggaactcatcaaacacctggcgatcaatgttcgacagatgagtagcgtcggagcgagaccggtggctgctgggaccaagcgaaggaactggaccgaaaggatcagaggacgaccgaacgttctgcgcagtcgcatgcggagcacggtagataggccggatatcaccctggctctgagctgagccacccgcagttgcctcctgaagttgaggcatacgccagctaaccgactgtttgcgggatttggctgaatctggtcgttggtgtggcggaacgtaagcaggggccgatgcgcgaggccgatgagtcggggtgtccggcagatattgggcagaatcaagtcgctgagagctttcacgggagttaccagagatattccagttgttggttaactcaaggagactgctagacatatttctggtggacgaaacagtcgagcttccccgagaagcacggccggaattcacggagccactgtgggaaactgaaatggtgcgctggctgtcaactgaggcgagactatgggttggcgatgagccaggagcagtgccaatagttgagatgctcgagtttctcctgtgaagttgctggaatccagtgatgatgaacttccgcagaacactagcttcgtagatgattgcatccttgaagatcttgctacgggcaacatcatcatcccactcaaaccagaaccttccgaagattcgttcgacctcagggtgagtgtgttggttgagaagaccgtcgttctcagtgcgcagaaccgaaccgttggacatgacataggaataaaactatatcggttgaagattgaattagtaatttcccaaaagaagacaacatctcagccatgttacgtacctgaatagcagcagaatggtgtccaggaatgtaggtcagagtatcgaatgggaagtaaaggcaccaattatggtccaataacccaattcttctcttatccttcgaccaccaagcaaaacaatatttcatgcgaggattaaaggcagggcagctgatccctgcattaaccaactcattgagaaggcggatatccaagcccactgtgtttgccttttgcatacgttccactagagtcttgatcaaagtaacaagagttttgaaaagtgcattgcggtgatgcacggtgtaaagatgagttgcatgccatgggaactacatccgaagacaaagaatgtaagtatgacatagaagggcaaacggagaggtatggacaatgattgacttaccttccagatagtggtaatgaacgattcgtaacaacgctgagggaccttgctagcaaatgcactctgcaatttgttaaggtcagtaacatgaaaaaaacgaagaattcaaaaggaaaagtagacgtactcggtgaggttgctctgcgtgccgagtgaggcaaaacagctcctcgtcggtgagaaagccatcaaaaccggtggaccaactatctttgttgacaagctgaacaggattcccatcctcccatgaaatgcacttcgcccggggaaaagcagccttgagaagcttggctggggtgctgagttctatgtcgacatggcggctacccatccgtggggtactaccaacatcataggcacgattgatccggtcgacagtttcttcggcatccttctttgttgggaattcaacatagcagtccatggtctttccagtagaccgttccataataatatggatggggcatccttgagaggatggaagcaggttcgcactacgtccaaggaatgaggccacctcctggcgagtcacagtgtacggaatctaagtatcataattgttagtactggaatgttaaacaaagcagaagaacatggtggaaactcacgttagaaatcaccacaacaccattgcgagaaggtggacgcatctcaacgatgctcccaaatggaatggatgcttgctggaggagttcttcgattgagaagttttcaagacgctcaaaatccccaaaattgggggtcccaccctggtcgaatggccagcccatgttgatggcgttggatggaccaaagttgggtttgcagacgtttgctgtagtagagaccgttgtcagtgaggctcaaacagtttcactgatgatggtatagcaggtcgaccgatcacgatgaatggattttgaagatacttactgggttggaactgaccagagaggtcaataggattgtggtgagatacagtctcaaaaggatatcgacgagattgggactgaagactgagaggagaataggcttggggcacgaattcaaagggcctgggatggaatccaggctcaaactcaagacggcggtttggagggggacgaatagtggaagacgaagatgaacttcggttagaagaggatggggtcgaaggaagggaaggatgggataggaggggagaaacctgagcggtaaactgggcaggaacctccacaagagcctgagcagaaagttgagtgagagctggggtgcaatcagagggcgatttcttgagagaagaacaatcatcgacaattccaggtgagtgtttgcgactctcagagacaggcgtagtcacagtcggtgactctgggcgtgagttctcattgagagacattagatcaacattagctgctaggatacttatactggcaggccaatcctcaaatttgggcatatgcccatgttgttcactcatgttttagggctgtctgggatgatagtgcgtggaaacagtgcgtggaaacagaaatatttacgagagaaagtgcgtgttggtaagaatgaactatttatatgcgtggaattaggctacaccacgcgtttacgagttcttacctgtgccgagagatataagatgggattcgatctcacctttctcactgccatgtgtgctgtttgtataccgaggctttacggtacgtatttaaagcgacgcactcgtttctgcccctatccactaatttcacgtacctgatccgcaccaactgaaattctacgccttccttgtagatatcgcttctcttgaagataagtattctgctacttttgccaaaacaccgttggtcgctggtgtgatttcttcttgtttattcgttcaatactataagcgctatgtaggcaatttccgtcttgattgggaaggaacaggccatactagaatagtaggctagtgaggcactatgtcggtggaaatgtgttacaaaaaaacccgacatcggtataaagttctctcttaatcaatgcaagcctatgctatctgtacaggagtagaaagtggcaaacacagggccattcattattcggaatcaacaaggaaacgcttggcaatttaatcgaactgattgatcgtcagcaactgggtcaatggtagattattccatagagacttaccggtgtcaggaaagactccgcaacaaaacgagcacgggcattcaactagtgagctgttagtgacctgcaaagaacacgaaacatccgtacacatacgaagagcttcatctccgaaatctccttgtccacctcctccatgaattcgatcacgaaatcaatgagcttgtgggtaagcattttttccgtgtggaagttcgtgatgaggaaactgatgtcatatccctccactggcttccgacgcagaatgaagaacgattccgctcgctgggtgaggaaccgagtgaatttgtggacaagaatgtgctcgatctcatctgcctgcttgattctgatacttatgcgaacagaattgtagcttggctcaatcttcaccttttcattttcattcctgctgatgtgcaacctagaaagccatcaatacgtttgtccggtgcgaccttggatgaaatgacggtcagacgtacgggttcagtaggatctccggcgaagaatttgcctcaatctctgggcagttgctggtgaagcccagtatattagcatattccatgtttatcacttgaaataggggcaacttactgccgctcggatgtctgagaagcgaaattggagatcgtaagagctgcggtgagagaggaccgaacactggtaaatggagtgtgagaaagcctgccgctgaatatttgtcaagtgtcgaactcacgcctgtaggtagggccggagagattgactctaataatcaattagtatagaacgagccagctgatttgagctgtacccaccatgatgagggggtggccacaaggatgcagtcgtgacgggtgatgatggtcgggagctagttgagaaggaattcaattagcccgttgtgaggaccctttgacctaaggcagtgagcgagaaaggcagttctctggataacaggttgtcttaggcagaagaggagttgacgtcggggtgggcggtgatgatagtggttgggcggtgagagaccccccacgctccctcgtcccaggtgtttaccatttgccccagcaatcgcaagctctttcaagctcttcatccttctcacatcatccatatctaaaacttattgaaaatggcggctataccgagtatgtatggacgtattggcagtccctggaccactactaacggatctacagttattgtcaaacacgccggcaagcgccacgaagtcgagctcgatcctacgacgaacggcgaaacactcaagtaccaactcttttccttgactggtgtggaacccgaccgccaaaaggttttggtcaaaggtggccagcttaaagatgatacaccgctttcgtcacttaatgccaaacccggacaggtgttcatgatgatgggcaccccatcaggaggtcaaggttccgctgaccttggtcggccaaaggagaccgtcaaattcttggaagacatgaccgaggccgaggtggcacgacagaaaggtgccagacctgccggtttgcagaacctggggaacacatgctacctcaactcttccctacaaaccttgcggagtgtccctgagcttcaggatgagctcctacggtatcggccaagtggaggatctggacagtcgactctgtcagacctcagcagctttggtattggtggccttggaggttctcgggatttggccgcttctctccgagatctgttcaagcaaatgtccgagacccaggagggcatccctccactgatgttcctcaatgctctccgagctgttttccctcaattcgcccaacgtgaccgaaatggacagggatactcccaacaggatgccgaggaggctttctcccagatcttgaaccagttgcggactaagttgaccatcaccgaaggcgagggagagtctgctaccaccacctcatttgtagataaatatctcgcgggccaattcgaatctatcacagagtgtgaggatcccgctgccaaggaactcggcgagcaaccgagtcaaagttcagaagttttttacaaacttgattgtcatatcggaaaagaaacgaaccacctgcaggatggaattttggccggactcgaagaggaaatcgaaaagaactcccctcttttggagcgcaattctatgtacaaaaagcgttctcgcatcgcacgactacccaagtacctcacagtccattttgtccgattttactggaagcgtgaaacaaaaaagaaggctaagatcatgcgcaaagtgacatttcctgccgagttagatgttgtggagttctgtaccgagggcctccgaaagcagctcatccctattcgcgacaaggttcgcgagatccgcaaggaggagctggaagttgaacgttctcagaaacgtcaaagagttgccgaagagcgtgcagagcgtcaggcgaaagagaccaacttgggcgaaaatgtggagccaatgcagaagaaggccgaggagaccaaggctaaggctaacgacaaggacggcgatagccagatggaggaaactttcaaaactgatgccgagtacgaagcagaaaaagcagaagctatcctcgctgctaagaaagagctccaagagcttatcaaacaacaaggtgctggagatagcggaaccaatcagtctggtctgtatgagcttcgcgccgtgattacccaccagggtgctagcgccgacagcggtcactacacggcatacgtcaagaaacaggagcaggatgatcctcagacaggcagcaagcgccgcgaggcagacgacaagtggtggtggttcaacgacgacacagtgactgaggtggacgcgcagaagatcgagaccctctcgggtggtggtaagtgaaccgcattctacattttaaaagccattgctaatgacatattaggggagtcacactctgccctcatttgcctctaccgcgcgattgagctgcccaaatgcgagtaaatgggcttgccttagcatctgttcacatggtaaagaaatctgcaaatgttgcctctagatgatagaaacgatgaacatgaatgatgctagtccccaccgccttcgctgttaccaattgattgtcttatgccttgcaatgatctacattttgtatgttgtagtcctaatggatatcttctagttagtgacgacatatatattaatgactaagcaatgtacacgtgacatggttgagcctcggcccaaattgtctcaaagctctaattctacaggactggcaatgtaaccaccatgatacattatcgcagcatcctccagtcggcccttcgccggtctccaatacacacacgatttctttggagaccggtggtccgaagcgtcagcaccgcggcacaaccaaatgcctcccgagaaccatcgcgctggacgcgccgcctggtctataccggtatatttggaacgcttggcatcggagcagggaaatggttggacaacaaaatctcatcgccattggatcctgggtcgttagaagaccaaatggagattcgggaaatccagcgggtattcgacattggactcccgattgtacaagagctgcgtcgtaaccccgattacgtggaaaagaatgtttacgaaaacttcgctgataagcacaaaacccatcggctgacatcaggccccttggctggcagtaggggcttgggattacaggttagtctctcgttttctcattgggttccttgcatgaatgccgaaccttttgactaccaagcctcggaatcccgctttttctaactgtcccgtatctgacagaaagttttctggaatgacaaagagaagaaaatcattagcgtggtcttcttgggaccaggccttgaaggctggccaaccatggtccatggaggcgcgctcgccactgtgatcgatgagaacctggggcgtgtagccattcggcatttcccatcgcgaactggtgtcactgccaacctcgagctcaactaccgggcgccggtctactcggacaatttctataccctgcataccaccctagatcaggaacgaagcacagacaccaaggcatatgccaagtgtgaggtccgtgacatggcaggccaactatgtgttgaagcgacggggcttttcgttgtccctaagacactcaagctaaacatggttggggaatatttctgaaccgcgagaatattgatatctacgaatatgtggcggcctttttcgatcgtgtgacttcttcgaagcttcggccgagggttgttatcaactcaacgccggtatcccggtctcccggtctccttgaacgaagccaactggaagtaggaagctagcaaggggaaaacaggccatatacatgaattatttttgtataaatatgtgctatctgataacccctaacagatacaatcagcgtctcttgtacatatgacaaggttattaattcaatactcaaactctcccagcatttgggtttctggctatttcggggctgatccctattctggcgtaggtctccggagcagtgaaccaaccgtatcatctacatgccttctccacgttttcttccccgcatttccccagcatctttgccccagaaataccagaattatgagggaattgccaagctgcctcggtactttctggatttcaagcattcctatcccggctatctgctttaacgcgcattactccgtagcttgtcttcatttccccactctggacatttcctaacttgaaatacggaacagattcagtgtgctgaaatgaaattatattattgtggccttccttcgacactggatttaattatcaatatcgtatgcatttcagtcgaattcaattatatccaattttgttgacttggggccaaggtcaattccccgtgcttattttgtttaacattgtgctacccttgaccctcgcccatcatggcggactcaatcattcactcgagtcggccagccgacgagaaggctgtgatgcagcatgacgaatatagtgacacctcacagcatagtcaccgggtaatggctgggccgggctcagaggaagctatgcatgagtctgagaaggatatcccggtagggctcggctgcttaacctgtggttggcgacaatactgatcgtcaaaagatgacattccgtcggttcatgggtttcgctgccatggctttcctgtggaccggaagccagattccagtctacctctttggtatgtgagaaacaacatgaaagctgtgatataattttgatgcatttccactaggcggcatccctccctatatttatggagacattggtggagcagatcgatgggtctggtttgtgagtgcatacccattgaagtatagagctatgattgacgagcttctgttaggttcttgcaaacttgctcggcctcgccggtgtatgccccttcgttggatctctatcagatctaattggacgccgcccagtcgctattattggagcatccctcatagttattggaatgataatctgcagcacggtgcacacaatgaacaacttcatcggtttgtatctgcccatatgtcgcagtacatagacgttctctaacatggatacagcgggcatggccatcgctggtgccggtgctgggatcaatgaactgacagccctggctgcaacctccgagatggcgcccactcgaaagagaggagtctatgtgtcgatccttatcttcaccatcgtaccattctgcccgtccgtgctatgggctcagcttattgcatattacagccattggcgctatgtcggtgcgttctgtgctgcgtggagtgcctttggtctgctgatcacggttctattctacttccctccgccacgagtcaattcagctggtttgagccggaaggagataattggacggatcgactttgtcggtggattgctcagcatcactggtctcattgtcttcttggctgggttgcaatggggtggatatatggtatgcttggagataccctgtgcagggctacatatcttactgacatattaatttagtatccatggacatccgcccatgtcctggcaccattgatcgttgggttccttctgcttgttgcttttgctttctgggaaatctatggagccaaataccccatttttccatctcgcctcaagcaagagcctcggattctaggccttaccctcgtcattactttcatctccggtgccaacttcttctccgtccttatgttctggcccacggaatcattcaatgtctatggccatgaccccgtggaagtgggtgttcgcagtctccctattggatttggcatcatgacaggggcatgtactgtgcttgcgcttcttagtatacttcgtgggcataacaaggaactcttgatcgttagcagcgtgatgatgactgcaggtgagttttcttgatgggtataggagttcccaaaaagctaatctgttctcctcaaaacaggatgcggtgctatgtctatcggccgcactgataatatgtatcagctttggggaattctcgtccttgccggccttggaattggaggtattgtggtgccagcctcgattattaccacaatcatttgcccggacgtgagtcatcttgctagaagggaggaaatttgcctattgacattagctttcgctaggatctgattgccactatctctgcactcaccctctctattcgcgtggtaggcggtggcatcggctacaccatttactacaatgtcttcatctccaagtttgtccccgcggcaacacactacatcggtggtgtgatgatgaaagagctcaacatcaccgacgttaagctgattggcgaagcaattgagctgacaggtgcctcattgctaagcgagctacgcacaatccctggtattgctggcaatgagactgcttatcaaatggtcgtaggggctggtcagcttgcatatgccgaaggatataaatgggtatactatgtcagtattgcattcgggggtgtctccattgtggccgcctgtttcttgggcgacatccagaagtatatgacagaccacgttgccgtggtaatgtgagagcgtacccccaatcgcgatttaccaaaaaattgttcatttataggatatgtcttaattatgagaccaatacaacaaaattgtgattggaagatattcaagatagtagatatcaataagtagtaaaagggcaggccgccgatcatgacgcgccaagcccggcaacttttttactcgcaaacgtcaatacacgcaacttcaatcagcagccatggcatcccaaccttctgctaagcggaaacccttaaatccctcagttccgcatggtgcagccgggtcgtctcgtaaacgcgccaaaacctttgatgcgcgcaccttgactgtgcagtcggccgacgccgccctctccgcaacgggcgagctcgatgtcgcggcatactctgcggctcgggcattcgagatccaggctctggaggagggaatgcagcggtcgaaaaatgcgctcacgacgcgagccttccaaaaagttccccgctctctgcgacggcggacagcgagtcataatgtgaagcgagttccgcgaaggttgagggctcgggccaagcgagaggtattcattgacattgatctacaaagttccaataacagttgactaacccgctatttcaaccatgctagatggccgaggataacacacctactgtaacggcgcgcagacgcaagccatcccagatgatgcgcattcggctcgataccgcacggcggctgcaggctatcaactcgaaaacaaaggcccgacgggcggccgcaaaacaaaaacgggaccaggagaaccagacttccttggaaaaggagggaagtcatgccttcgatattgcgccacgagttcccaaaataaagaagaataagctatcgaggtctattccagcagagcctaagtaccgcaagcgccagcgatgcaagacatggctacctactcatttgtatcatgcaaagcgagctcatatggcgacaaccaaagacccgatttggcgttttgctattcccttatcccccaccgaaaaaagctatcggcctacgcaccgggctcgaggcgcccggggtgccgtggcgtgggatatgagctatatgtctactattcaggtggaaggaacagaaccagccgtccaggctgtcctaacggcagtgggtattgacggggacaatgcatggggcaccaaggggaagaaatggagagctgggactcggtctctacgggcctggacttttgaaaaagatgatcccaaacgtccgaccgcaccagtaacattgatatggtgtgccaagcagcaagatgttgagatgattgatgccgacgaacctcagcccaagtcatctaagaaagatcaccgaaaactctggattagagtccatccttcagccttcctccagctgtggacggatattcttggggtttccaaatcgcaaaaccccccggtcatggtcgaagacctgcgattcgagattggcagtattgaaatcacagggccagggtctaccgagaccttgttggcggcactgaaaccgattcttgggttagatggcaatgctccatcagcgcaaagtccggaggccgtttggccatctcttctaggggtatcgaacccgtcctcactgccgcctaattctctcctctcttttgctatttctgatcctcgcctgcatttcccgccacgaacacttcacgtcccggacaatgaatcccatttgaatgaccttgccatcttactttctacgtggcatccggacaaaacccaaggtccctctatgctgttcgaccgatccactcggttaagagcggctcgtcagcttccgagccagaaggctatcaaccgacgccgcactcttgccggtcctggtgaatatccgccatcccaaccatcagatcctcaaattccgatcatgatcctcgcaaacaagccacaagcccgggccaaacacagcagtgccccggggtcctggaccgtattattgccatggaaatgtgttgttccggtctggtattcaatcatgttctatccattatccagcggaggaaacccattgcttggcggtttgaagcagcagcagcagctcgccttcgaagcaggcgaggcttggttccccggagatttcccaggaacacgagctgggtgggcatgggaccaacgtgagactgcgaaatctcgacgtgactgggagcgacgtcctaaggggcggcgccccgaattcgataatatctcgttgggtgatggtcgtccaaagggcgagataggccacgggtgggcctgtgactgggaaaggcttcttcaagggccgaaacacgacgatgcttcaaaaattgccgatgtcagttcggacaaagggccaaccaagtccaaggaggccgagacccaggacccctctgctcccatcatcccacccctcaatattcacaatgttcgtctccctccggccgatagctaccaaatcctgagtaagctcgacacaacatccgtcgatgtctccacccttgccacggtctatctttctctcaccacgcgaggcacacccacaccccgtgcacgtatctaccgacttcctacggacccagatctacgccagaaatggcttgatcttggctcggcaacgatcaacaagtctagtcaatcgaagctctccaagggaggatctactgcacccgaatctgcagaggctcggcgtctccttgccatggctctcatctcacatgctgatggagagcctgactctgagccattggacgtacccaccgaagatgacctgattggatttgtgactacagggaactataatctgtccgaaggcaaagggacaggcattgggtctatccagctctcaaaggtactggctcccaatgccaagccttccgagaggagaatgtgtatcattcgggcctcgggggagaagagcgggcgtttagggatatgggaatttgtatgatatccaattcaataaaccagcagtgaatctgcccaactgtggtgttaaacactgtctgccccagtcacttgatccttggtatatctttctactggcagaaggatagccctcccaaaagttaaacgacaaagatccactctcatccatggattaactctatcctatccagatgaagacaaatggaacaaaagaaaaatgcacattctatacatacagtacagcagctccctgcccaaaatcaggtcccataaaacgtagaggcttcacatcaagccgctgtattcccgaactcaccgatctaacccacaatgcgatccacaaaagcagcctccatgcgtgcaacctcgcgcttgaaagcatcaacctccacccagcagttcaacggccggcggtcgttcaactgcagacagctggtaacatccgagcgggccttagcaacgccatcatcgagctccacaagcttcctccgtccatcaagcttgctccgcagctgctcgatctcagcagccacagagttgcgcgagacgtcacgcttgacgggccgggtagcgacagcggtctcctgcggcgcgatgactgtaggcgcggggtcgtggtggcggccggcgaaggggatccgcggtgcgtccaggttcagtgagccggctgggtagcccgaggtggaaggagcgaggggcgcggttgctgctgtgacgggcagggaggtggtgtctttggactctgagatgcgcttctcgatctcggctagggtttgctgctctcgttcgcggaggcgttgcagttcctgcgcgacgcggttttggatctccaattccaggactttggcgcgggtggagtcggtctgttcaattggtggattgtgagctttttggattgagctagggtattgctctaagccgcgttgtgctcacctctgagtttgattggagtgcgtcaactaggtttgaggagaattggacgggagagttgctgtgcatggttaggttagcattggccgtaggatgctttggatgagctccgcggtgtcgcatgtagtgatggcatcctgagagctcctttagatctactggaaccagctgcccttggcaattggtgccaattggaaggtagttcccgttctctccgccatcaagcatgaaatgccgcggaagctgaaatcgaagtcggagagcacatacctggagaacacatgttgtgagccagccgaagcctcgggcttagagtttccagcacccatttttgggggaatgtgacgagtcctgctaagatagaaagacggtgatggttcaagatgcccgctcacaacccgttcagttcggaggatgttggaggtcacgtgtttatgttagtcatcaccggccgggtcagttgctagtttcacgtgacggtacatacatctatggtcacatgatacatagtctggcatgtcaaggtcacctgaagtagttactgaagagggatatgcacgatgggcagtctagcctagcagacaagacgtttcattccgtgagtggtttctgggctagcttctctactctaggatttcacttgacatgaaggccccgagattatctctctgcctgaaagacaaggcccatactggaggattccggcttttcccactgcatacaaaatctactcacgtcctctaatcatgtggaatcaacatatcgttctccatggccgatatgagcgatattgttgatttcatctctccaaattccccggacctgtctagcaaagacagatggtctatatttgatccaggatttagagggtcatattaatcgggtttaagacgtagtattagacctagcatgattcaatattttaggttgttaagacctccaaaatgcatcatcgagagctcggccatattgactttagccatgaggaaatgatatgctattacccaactcttggttgtcaaatttcgtcaaatcaacattctttccgagacttctatatattttggtctaggcccacaccctcctaagtactacggcagaattgcaatcagactaacacaatacctcaaaggacgatagtctccgtgcggcaacagtcggtgttgtgggtagaaccatctttcttccatggttattttgctaacaccatactagagattcggatacttagccagactaatcaatatgaaaatgagcatcaagtactccgtaaaaaagtaatgtatgacatcggggtccggccatttgacgggccgatgtaacccgatcgtctctgtatctctatgaagcacaatatgcacatgcacatgcacatgctgtgctgtatataagcgtgatatggtcaactaaatatcaatgctaatgctttcaaatcacccaagtcagcatatacaggaacacacattagtggatgaatacggtgcaagatagcaggattatcccccgacgtggcatttgtatattcccgtcccctgccccggtcttagcctgtgtcgctcaccggggaagtcggggaaaatacgcagttcgaaagaattggccagtaacgacgcctccccgcactgtctaaatgtctcctgttcatagcgtcatggagcgaaaatctgggttgtgaatgccctaggaatgtagagactgctttcggctatagacaggatcccacgtagaatactccagaccaatatttgttgattgccctatagttcaaagtatgagattttgaagtacaattcaaaacaaagtaacatttccggtgaacccggcaattcccccgtaccttgacactacatcgtagatacttcatcaatagtggccattgttacggcggggagtgtactgccaaggtaccggactgacctcatggatacccccctccccggtcccctcatcccaccttatgttctgtatttcgtatcttgtttcttcactctcccccttttcttcttcccttcttcttcccaacctgtccttttccattcttttctcaattagccgataccttaactctctactctctgctcggctattctcatttcatttcttgttacactatgtcttctgcgctcttggaccaagccacgcgcattgcgcgcggctttgattaccccgccgagaatgtgcagcgcggggttgccgagtacatcaagcagtccaacgagggcttgaccaaagagggtgccactttgagccaaattcccacttttgtgactgcggtgccaaatggcacagagaaggtatgaaggcaaactatttacaatgggacttgcgcgctgattctccttgccatagggcctttatttggctgttgatcttggcggcaccaacttccgtgtgtgctcagtcctcctgcacggtgatactaccttctccctcacgcaatccaagatcctaattcctcgggaattgatggcctctggcacatcgaaggatctcttcctgttcttggcccgtcaaatcgaagcattccttcgcattcaccacaatgagcacttcgaggcccaccagctccgccgacaggagggtaacaacgaagaggacatgttcgatctgggctttaccttcagtttccccgtgcgccagtgtggtatcaaccgtggaacactgatccgttggaccaagggcttcaacatccccgatgcggttggccacgatgtctgtgcgctgcttcaggctgccattgatgatttgaatctgccagtgcgcgtggctgcactagtgaacgataccgtcggtactctcatggcccgctcatacacctcgccaggcaagactggcactttcatcgctgccattttcggaaccggtaccaacggtgcttacttggagaagaccaagaacattaccaagctccagcatatgaaggatgtccactttgacgactgcacaggcgagatgattatcaatgccgagtggggaagcttcgataaccacatgagcgttctccctaccacggtgttcgatgatgagctcgatgctgacagcaacaaccccggtgtgcagatgtttgagaagcgtgtttcgggcatgttcttaggcgaaattctgcgccgtgcgctcctatctctacaccaaaacaccgacctggaattcttcaaggccaacaagaactccaaggtcgtccttcctgaaggatctagactcttccgtcaatggggtcttgatacgagcatgcttagcccaatcgaggctgataacagcaaggacttggtggatgtgaagaccgcattgaaggatcacctcgagattgagaaccccagcctggaagagtgccaggctgtgaagatcatagttcacgccattggaaaacgtgccgctcgcctgagcgctgtcccattggctgccattctcgtgcacaccaacaagcttgagactgatgatatcatcgacattggtgtcgatggcagtctcgttgaattctatcccaattttgaagggcatattcgtgaggctttgcgcgaggttccccaggttggagtcgcaggcgacaagaagatccgcattggcgtttctaaggatggcagcggtgttggtgcagctctgattgcgctcgtcgctaacagggtcgatggccatcttaaaattccccgcgagaaataaatgacctgaactatcctatggttccctttattgttgtcttttgtttgtcggagctctccgattttcatgacctttaaagtgtccatctctctctccccagcgaagttgaaaactacgtaggttggtcgaccaccctaatgtcctcagaatctcagacctgccacaatccgttagtcccgaaacaaataccaacctgaattctttcatctttcgctcatctaaacctatggcaacactatcggctgaaatcaagattcagatcttgatagtcaattgccaacccgcaggactttcctacctgcgggtgagggcatccgcaattatcatatcacgccccattccatcaacttcccataacgaggttacatcacattggggctgaattctcaatttggagttgcggaggcttcctccgaggccttgccggcgtggaacggcatgcgatgcaagaaattgcatcgaactggcttcacacccattgtcatgtccatttcttgtctatttcttacttcacaatctcattgctttttaatgaatctctacaagtagatgaaccccaaggcggataatatcacaacatttagaccagttctattggcgttatatacttctgaagcacatcaaagtcccctatttagcatgctcatacccaatagcccgaggtgcctgtacaaaatcgatatgaccagctgggcccgtcaagaaggccgacttcccaccatcagtactcggatcatatccaatgagattaccggggaacccaatatcaaaagtagttgccgcctccaaaaactcaatctgcttatccgtaagccgaatcgacaacgcccggatattgtcatgcagatgctcaatcttgcggcctccaacaagcgggaacacattcggcgccttgcagagcacataggccaacgcaatagcagtaaccgactcaatcccatgctcagcagcaacaacggccaatgcctcggagatatgcttctcctcttccgtctgctcaccacccaccgtactacgcagaccctcgcctgccttctttcgctcctcgagctgtttagcagtctggaaatgcccactgccaagcacatcccacggcgcaagcgccatcccgaaatgccgcgccatggggatgatatcgcgctcaaagtcgcggcgcatcacgttccatcggccctggtagatggagaaaggtgttttgccgtgcgcgcgcgcatacgtgttcgccgcggaaacgacccacgccggcgaatccgaaatcccgaggtacatgaccttgccttgctcgacgaggatatggagggagtccatgatttcctcgatggaggtagtgtggtcccaccagtggaggtagaggacatcgatgaagtcagtttggagtttgcggagggagtcgcgaacgctgacgatcatgttgcgcttgtggttgccgcaggcgttgggggcgttgcccttcccgagcgcgtggctgcggtagtcagttgtgaacttggtggctagcacaatctggtcgcggttgttgcgtgcggccatccattcgccgagccaggcctcggattgttcgttctggtagttgtttgctgtgtcgatgaagttgccgccggcggcgacgaaggcgtcgagcagttcaaaggatttctctttgctcatgctacccatgaattggctccaggcgtcgccgatggacattgcaccgagctggagcggggagacgcggactcctgctgttgaggagaggacccggtaccggcccagaagggtggcgggctcaggggcagctttgaagagttcgtccattgtatagtaggtgtggtgttttgtttgttgttatgtaaatcgatggtggtgggctggactatcattcaggtcggttggagtgccttttatacttggtctttaccaatcaagcccggagataataactcggtagtatcggctatgtttgtcagcctatttcatccattgaccttgatgaccggaaataaagctccctcgtgatatatctccgttcccacaatttattgctcgtcttcctgctgcctcatacatagaccctagataagtaggcacataattatagccaatgatcaagctctacgtgctagtacagtattttgtaacgccaatcggttatttatagtgtatgaatccgtagcgccgcccctccctgtgggagacaggaaatggatattccttaaatccttaggggtgtcgagctcttgaatcaaggcgaagactactcagacgaaaaccttagaatagctatatagtgccagtatagatcagctgagcccatgccgatgctggctctaatcatctaagctgttagaatggcgagtatagccagatgagaataatcatgatactgtgccaatagtgttctacatcatagaagtatgatgaccaggaaggacaagcttaaatccgatctccgagttggttctttggttctaagccgcactaatcctaatcccgttagagccgtgtcagctgtctatcgttgcatattaacgtaatctccgcaactatccacgtcgatagaacacttgtttctggagtaaacccttgatctctcttctctgggctgttcggaccctatgtttatcctttgccccctgattcatcaacagcggtgtactcagtaatccgttacaggatgtttctctggatggagcaaggggtgatgttatgcacatccccctgttcgttgattggcgagcaatcaacatttacacgacagccgaataattgatcaccctgatccttgcattcccctgactgcaactccacctaggcaaaccgaactcgacatcttgtccgcgttcaagcgcacgttttgactcaaacccggtgtcttttctgacggcgcatgatgttcaagtctactgcgactaattatagttgtatcaccgcattttcggttgttgctattgacgaaccaatagactaatcccttgagaactagatctcgctgcctaactgcaaaaattaaatcggcagggtatgcagctcggcggaggattccatgtaccacatggactctcgaaatacgatcgcagggttctgtgtagcctggattggtccttttctccttcccaagaaatttacaggcaaggttcttcatgagacctgtacgaactggttgtgtttccaatgtcactcttggcttattttccctgtttccttttaaatcgctatgttttcctgctcttcattcgtcccaactttcgttaaatctcattacgggcttttcccctacttatttaatacttgtcttttttttcgttcattatgggcttcctcaatgccttcaaagctaaatttcgcaaggagggagatgtacctggagacaaaaccgagcacaacaatgagcacaaaaatgtggcacccaatgacgacacccattcccagtctgaaggtcagacttcaaagcctccaagtgaaaaggagagcactctagtcgatgagcctttgatgagaaatactactcccaatgatgacaccaagagtgaacttgcgagccgtaataatccaacgcctgttcacaacgactccaaccgggagctggtccccaaaaagccattcgatgagcagcccacagaagaagaaaaaaaagaggacagtgacgccgaaacgccggaggatgaggaagaatatccaaacgcatggagattgactatgatcagcattgccttgtgtctatgcgtgttctgcgtggcattggtacgcactgccaggctgctttacttgatgattatatccagctaacaccgatcctccaggacaacacaatcatagcaacagcaattcccaagatcactgatcaattcaactcactcgaggacgtcggctggtacggaagctcatatcttttgacaacatgtgctgtgtccctgatgttcggcaaactctacacgttctactctatcaagtggatatatctcagtgcgctctgcattttcgagatcggctcgctcgtttgcgctgtcactcccacctcggtcggactcatctgtggtcgagccatcgccggcctcggagcggctggtcttttctcgggctctatcctcattatcagcaagagtgtacccctagtcaagcgaccgatgtatacaggtcttattggcgcgatgtttggtattgccaatgtagctggtcctctgtatgttgctcctgttccttgattgccgaattatgctaacttctgacaggatgggaggcgcattcaccgaccacgtcacctggcgttggtgtttctatattaacttgcctatcggagcagtgactttcctcttcgtgctatgcttcttccaagcacctaaagccatcttgaagaagaacaccttgagagaacagatcaaggagctagacctggttggctctctctttttcctgccctctatcatcagcttgttgctggcgctgcaatggggtggtaccaagtatgcatggggcagtggacgcattatcggcttatttgtggtatttggtgttctcggtctcatcttcattggggtggagatctgggccggggaccgcgcaactgtcccaccacgcctgattaagaaccgtaacgtttggggctcgacatggtatgcccttgctcttggtgcttctttcttcgtattgaccttttatgtgagccccctttccgtttctttcttccgccgttcgctcgtcaagctctaacattctcagctccctatctggttccaatcaatcaagggcgcaaccgccttgaaatccggcatcatgaatctgcccatgatcatcgcagtcgtggttgtctctatcctggctggtggcctcgtcaccacctgcggatactacactcccttcatgatcgcctcggccatcatcatgaccatcggcgcagggctccttacaactctagagacagactcaaaccactcaaagtggatcggataccaggcaatcttcggtatcggcctgggtctgggcatgcagcagcccattatcgtcgctcagactgccctgaaggccgaagacgtacccagcggtacggctatcgtcatgttcgcccagactcttggtggcgctattttcgtttccgtcgggcagaatgtgttccaaaaccagctcatccggaacttggctcagtatgcgcctgacgaagatgctgcgaagctcgtatctgttggcgctactatgctgcgcactgttgttagtggcgattccttacaccgtgtcctggttgcctataatgctgctattacgcagaccttctatgttgctgtcgccatgggcgcattgtcgctcattgggcccatcttcgttgagtggttgtctgtcaagggcaagaaggtcgaggtagctcctgtttgaggatcaggttcggactaggcaagtcttttcgtgcacattgttcaatttcttttctttatatcttttttcccccgttctttgtggaatggtctacggaatattgtactgggccatatatgtgtccactcatttctattgtttatttataattcatgcgtatattgatatcgcataaaaagcccaatcaataccattgctttgcatgatggaatatatgtttcttgatgcttttctatttctcttctttcaccacctattgtacgcagtcagttggggcgagagcgaagcggctgtaattctattagtatccaatttcatagggttcgatagtcccagttgtcatcaaagtctaacctcttccttcctatttaggaacaaagttcatgtcttacgtacaccttgcatagagagattgagggatccctggttgtatagatataaggttagcagcaaggaggtgatatatatttttgatatcaacggtaaattgacattgaactaagctttattttgttcggccttgggtgaacccctttgacctattattgtactaattccttcgataatacgacgctgaaacagcaaaaagaagcaaaatgacacacaaaacctaaactccagcatataaactcaaataaatcccccagatcaccccacacgcacttccaaagaccactcgtcgatctacaggaatgattgtgtacattaagaccgaaacaacaggccgatacttcagacgggcactcataagaggtcgaaaatcctacagaagtcagcatctgtgtaatcagcattgttcaacagaagggcaacttaccaaaacaaccaaatcccacgattttgccaaactctctcccttcagcagattgatgataaccacaaatagcacaagatttacaattgaggcagccgtctgatcaaacaaaaatttcatgacgaagctatgcagcccagatgtcggcgctggcacccattggacatgcttttctttgtctttgtggctagggagcgaaacatcccggcggaatcttgaaaagacagaaagccatgagcggggtgagaacagagatttcagcgatcgagcactgaatgcatttgagagttcagcacgcgtaggaaaccctggatagcgcgactccagggcgcgttgccagtagaaattgggggccacgattaagatgccataggccagaaattggaggagggccagtgtatttagagtaaatggagtctaggactttgtcaatgttgtcatgagcatagaaaacagaaatttttcttactttgttgttgcgctggtcaatcagctgcgcgaggacattggagatagcattcaaaatggttgcctgcacgaacgtcacaagcaatggtgagggcatggtgagaaggccccttggaccaaatccatgtaaatatcaatgttcgactgaacacaaatagaaaggttgaaaagggttgccaagcgcaaccgtgtcctgagaagtcgcgaggttaagggggcaaattaaggctgagagattaggcgacaactttgatgttttccactttttacatcttctgcatcgcttattgtcttgagtaacaacttgactaaattatctccgtcgaaatacaacattcggtccattcttcgccgaggtaaaatgatcggtcagcgccaggtgcccccccgcgtcttcgccctgacgatcggccaatgacatgtcaaagaggaacaccagccgcgccaatgttagccgcatctccataaaagccatgctcttgccaatgcatccacggggcccaatactaaacggacaaaatgcgtgtcgcgcagtctcaatgctctccttggtcgtctgccaggacaatccagagcccatgcaggtggcgttctcaatccagcgctccggcatgaaggtccctggttcccggtagtatcgctcttggcggtggatggagtatgttggtgtgccgcagtctgtaccggcgggtaggaacacgccgtcgaccacggcgccaccttgcatcacttcgcggggaatcgcaccgggcaccgctggggccagacgcaacgcctcgtcgatgcatgctttgagatacaccagttcgccgagctgactgctggttatgatctcttcgacttcgttaaaggcgccgcgtacctcggcacacagcttggccaatgcatctggtctacgaactaagtagaagagtgtggctgccagtgtagtcgaggttgtatcgctgcccgcaatcatgaggacgttggactcgccccaaagctcgggcgtgctgagtccattgccggtctcagggtccttcgcgttcaacaggtaataaaagaaatccttcttggcgtcccgaccaatctgggtacgctccttagcgcgctcgttggcttcaacacgcgaattcataatgaagttccatcgatcgcgcgtcagcttgcggatgaatatctggtccagaccccatgtgtccaggggcatccaaaggccacactatgagagaatcagatgaattgttccttgacgatggataaaaaagaaatgcttaccacataatgcctgttcgcagcacgatccaccaacccaactttatatctcctcgtctcagaaataagcatgtcaaagctcttcccaaagcagagctcgcccatgacatcgtacgagagatagctaaaccaatcacccatgttcttgacattgcccttctgatcatgcgattcgaaatccccgtcatacccagcaagcacagcacacagctgacgcacatggaggagcatcacatcctccatccccttcagagcattatcagaaaaggcctggctaagaactctccttttgcgaccgtgcatggttttatcaatagcgttgtgcgtgttatacacgcccttgatagcagggaaagcattgtaaaaattggccttctgaaggcgtttcccgtgcccatagatatcgtgtaatccacggtcagagttgacagagatgaaattaggcgcaactcgtacgtgtgtcccgtactgactgtgcagcctgtgcagccagaggtggcggtcgcccttcaggccatggtagagctggacccagggtgtgatagatgcgaggaaggggccgttgatacggcgaagtgggtggatgaagcgattgtagagggtgtaggcgatggtctgtagtcaattagaagttgattgggggtatcaaaagaataggacgtaccgctactgctaatagccctaccaagcctcctaggactctttgtagagaaaagcaccccaagaccgattcaacaaacattttgtgagatgatcatgaaggaataagcatagattggctaacatgttacatatcctgtccaacatcctttatactccagctaccgccgatacccgcccccaaccgaagctgatagtcaatgatgacggatccgtactacaaaacaggtcggcctttgctccaattaagaattgccaatttctactacggatagggttctgttggctcggttataggcggttgttttaggatacattggagcgccgttgattggctatgcttaaatagccagtatctgcggggaagcttcacgtcggggtacttttgtggggaggatcctgggtttctatgttctaaggacaaaagaaatgaacttttcaatctgaggccttgtgaaatagtgagggttcattgtcattaatagtcacatagaaatgcgacataagcgatgtatcttttctatttttggcaaactgccgccatacagtagcatcccctgctagcagatattcccctccatcggctccactggctacatatatttctccaggtaagaatgccaccgttattagccgatttacagtgggtaatcagacatccgctccgaggatgccgcccttgtcaggactcaggaatgcgtcaaacacagtcaacatgcttttttttttctcgcatgaggctgtcctgcaacacttatagcaataatgaaaccgacggtaatccctataaagtgcctcccgaggtggtcgatttagagttatgcagacggcccgaaatggtagtttctgaggctcaagcgttggaacttgatgaatccatataagactatgtttgagtggtgtacccatgtattcctccatccagaatccactgctcattgtcatcgttgtcatcttgcacacgtcgccaagtctgttttcgttcggtttgctccgctgcttcagcttgctttatctcgggggcacgccacacaggtcgcatgagaccaccagccgcgagaagggggttacgactgaaagcaggttgtcctcgcgagctgtcctctgcacctccttcctcaacagggtcaggctcactgacctctggggttgattctgccggcgcagaatgatacactcggcggaccttgccacccttgatatcaagactcatcacggtcttcttcctctcccactcaggacgagctttctcgtctatctcgcgctggatgcgctgctgctttttgagcgccagtgctcgttgtgtgggtgtcatccacaacgtcgaggcgacatttggggtctcgaaatctgctgtttcatcaacaaccttggtccgacgggcattttgcgcttggaactggagcagcttgtcccggtgtgctttcgcgacatccagtttgcttggagcctcggacccggaaacaggtctaggaccgccgtcatgatgaacaccttcattgtgtacgcgcatcttctcttgtccacgctccgcccgtagttcccgaatcatgccttgcacttcctctgcggagaggagcggtgtgccacagaatgagcacggctgtagaccctcaagtgagcagatgatttttccgcagttaaggcaattgggtgccgggtcaaacactggatgtagtaacccgtagcaggagcatttgcgtttctctcccagacttggattcgtcgatacctccagcgcagcgatagccgcggtgaggtcggagatgtcattggttgtgagagctgtatttccctttgaagacgatcccgctcctccgccgtgacgtgttgacttgctcacttttgatcgcacatttggtaacatgtccgagatcgtagggccactcgccgatggtggtggcttcggggatgacacgggcaagggggaggtaatgcgcgccgaggctgtggacccacgcggcgatggtgcaagagagggagcagctggttttcgagaagacatatagtcttcttcatcggctttcttgtagccaccgcctacatcgccgtagttgtcgggtcgacgtggtgggccggcagtgtgcagcggagccttcttcttgcccttcttggctcctccgcttggccttgatacatctctgctttgtgtggaggggttctggggtggtcgctggggttctcgacgtgaattaaacgaggagatgaattctagggccgccggggagtcaccgaggaggtttttgagatggtcggcacattcctccctcgagaggctgagcgcatagtcgataacctgagaaagagaatctggatccagcgggataagctgggaaagacgaggagctgcccatgcagtaagatcagccattttagaaaaatatttaggcgttggtgaatgacaggtgaaatgcccgtggatccccgcatttattaagcgtccccggtgcaacccacccaactacataggcatcaagtctctaaacacagtgccaatcaatttcaacctgttctcggaataattacacatccaatgttagtggacatttttttttcaagtgacaaaatgggatcaggtagcgtacatgttaagctggaatccaatgagttcaaaattaagaaaagaaaatattgatattagcacaaatcagttgcatatttcttgcagtgcctctgtcggttgtatctcatgttgtcaagtaatgtacaaagcccacctccctcgtcatcattcatctatgcagatttatccgaaggaaaggccaaaccatgaccagaccaaaccagacccagagacgccatggaacataaccagcccatcaaaaacaaagctcaaacgccgcggacaccatggtagagaaaaagggtatgaaaaacaaatgaaagtttagtcggcgttctcgctcttgatgtcgtcgtcgttgtcttcaactgtgaatgattgcttgagcttactgggaccgggctttttgctggagccctttttgggtccattcagtttcttcttcttggtggggctggggctttcttcgtcctcgtctgcgtaagggcgcttgggtgctgatgaaccgggactattgccattgctagctcccccgtctgtgggagtcttattgcggccgccggtgcgaccaccacagacgcagcgttcaaggtgttgggcgagacgagtcatgacgaagtagcgcggacagataggacacttggtggttggaatttcaggaatggtactgtctcggtcacccttctttttcttggggttcggcatgactgcaaaaagcttgccgtggacatcatggccgggcaggtcaatcatggggacatttgtacagtactcaacgtggggatcgggagggggcagagaattagctccggtggtcggatacatgagtttcgggaggcggcaatctgggcacacatgctccttcacggttcgcatgggatttcctttgaggaagacttttccacggctgaaaatggccgcgtccgtctccatgcgcatacccgcaagcttcttggtgtcgagaacaacttctctcttagtatcggtcgaggtcttgctaggtgcctcctccggcatgattgcgtcttcctccgccttctgtcgggcaagaaccaccgcggaccgcatgcgcgccaccttctcttcgcggtgaactttggccacaaggtcgtggatgatattctggaatgtttcgttcaggatgtcggtagcctaaaaaaaaaggcattaggacccgttatgaattcacatcaagttcactcggggccatcataccactttagcgatcgttccggcaggataggtcggcctgcgaccaccgctgctgttggagtcggccattttcggattgcggccggagatgaatgcgccaaatatatctcgtccggacctgattgaccgacggctgtgtctgcccgcgacacaggtagtgtgtgctccgaaccgctaggtccgaggtttagttctccatgtactggaaatctatgcagggttgacgcaatgggtgcacggatgtaggagagaggaagagagaagaaatccaaaacatagaagccgaaataaaagggagaaagaagacaataaggagagctgaattgtatagcctagtgtaaggcctgatgtcagtgagcttcaataatggggcgaggtagaattaatagccagcaacaataggggaagacaatgtgatcaatgcaggtgttttatcaacgcatacaatggcaagcaggcatcgagaacaaatagggcactaacctatagaggtgtctatttgcatgcgaatcaaatatcactcggggagatgaagagacggatgaggctggagcaagttgttcactgggcttatcttatcgtatctccgcattcgctgcccagccttggaggtgcctgcccaggtggtttgttctttcacaaacgacccctgaatttgctccaagatggcataccagctgtttgcaaagaatcagacaaggcaagcgacttcttcgccgtcgctctctcctcctccgaccaatcgtcaccccatgcggcctcctatccatcctcctccagtacagccgcctcaatcagccgtcgcaaacacgcctggcccaaaacattcaaaagaagagatctttgtcccatatcctcatgacattccagctggtgtggcgacaaaacacccccatataactgtcgagaaagtcagcaccgcgcatatcccttccctgacgcggatcacgggtttactccttcccatccgctacccaaactcgttctacacagcgatcataaccgatccggtgatcgcttctatttcgcgggttgctatttaccatgatcaccctgttgctgcagccccggggtccggcgcatctgccgggacggacaaggtgatagggggcattcggtgtcggctagagcgaatccggcaggcagaggactcgatcaaagaggccaaaatacaagggaatggatgtcccacgaatctctacattcagactctacatcttctctcgccataccggggccgtggcgtggcagcatcactgttgaattcgcttctatttgcatcgtcaccggacggcaatggcaacgactcataccgggtatccgagctcgtcaggcactacaatatctgctctgtcacagcacatgtccatgaggcaaacgaagaggggttggaatggtatattgcgcgtgggttcaagattgacggtgatgtagccgaatactatcggcgattgaagccgtcgggtgcgaagatcgtacgactagatttaaacaggaatgagaaagatgaatcatctggtccgacagaaagcaattctcagactacagattctcccggtgaagtagaagacgaagactgggagaaggtggaggcggaggatggcgaagaaggtgaccatggaatacagcatttgaacgaatcgcaagtccttgtatatcaggatgcgccttcgcgcaagcgcaaggctgaatatgatgaccacaagcctcacctcgagtgagatgtgcttcgcatgtgtggctttctgttatacctcggataccccttgcatttgtttatatatctgatttagaatagtgcttgtgtttattcttaatgcgtgcatgatgatatttagttgaatatgagagaggatcgtgacatacactcctacgtgttggagttgagcattaaaggaactggcataatattcatataactgcaacgccatgggtatcaaatcaatagaagacaggaacgctacattagatattatagttctcggcatgcaaaaatatctcatctttcgacgagtccataatcacctgcatctgcagtttggctaccgtgttggcgacttcaactcgcatgctcggtggaccgcagacgaaaacacacgcacgacggccgaaggttttggaaaactcgttgaccatctgcgtgatgttcgggcggaagtaatcagtccgccagttatcacgtccacgtgcgtgataataagcaaaccgtggtgcatgtactggcggcggcacaggttgagatgcgccgagtcggaagtcgaaatttgaggtgccaccactatttgttgctgcggggctgtgaaggttcatgggaggctggtagaattgacgggtactgggcacatgggttgccatgtacgcattgggaagagcagcgacaccgtcttcattctcacggcgcaattccttttctatatcagggttgccggcagcttcatcgcgtatataagccgagttccgcttatcaataccctgaagcataccgtaaatcttctcctgtactatgtcccgtccaatttggtcgtcttgcttcactccggtgaggaagaaatgacagctcacaatgttagaaggtgcgtagtcacggcatattcgtagttcctcctggaaccactccatcatctcggggttcttgagcgcccaaataactttgaccgatttggtgatagccttgccatctcgaatcttcttgatgaggtccagaagttggcttgcaatggcagtaatgccacttcctccggcaaagaaaaccacgtcgtcgaaagcagccatctcgcgctgcataccaccgtatggcccttccacaaacgcgctgtatattttgtaggggccatgttccaaggctttctggaatacctcgcgtgtgaaaccttggaatggccggaaaaccagtatcatgtcacgatacttttcaccatacgcagatgggaagtcgtcgctgcaaagagaggcaatcgtgaaagggtggctctggatcacggaaatccttggtagtcgcaggtagacatactgaccaggtctccaacgcatctttgtgggaatggtgatctttatagcattttgcggaagaagggttatggctgcctcttctccgatcaaaaatgacgaacgcaaaggatgtgtccagttcaaatagaacagccggacgagatatgagatgacccaaatggcaagggttgtgaaaaggtaggcccatgatgacaggtagttcctcgtgtgccagaagagcattgccacaaagatgtacgagactgggatatggacaaagacgaaaagctcatacatccaattgcgaaagactggaagagaatggatacacaacacaagcagaggaaccagcgccgcaattccagtgccatatacataggcgtgtggtgggatacctatgctatagttgaccaaagcaccatcttcccagattggagtgatgtaaaacgggaccatatgaaccaaactgaggaagaggcagatataggctgaccagcggtgcagtccatttaaccgctcaggacctaggccagtcatcatagtgataaagtttgccttggtgctgagcgcaacaatccaggggatcatagctactgcaagcatgcctgcccggatagcgagcggtggcgaccccagcgcaattgaccaatagtataagggctgtggcacgaaacagtataaaacaacgaagacaaatgcaaccaagacaatcgctgtaaccgccaaagacggcaaaacaagctctatgttcccaaccctcaggacgggaactggtcggtagaagatccatcgcgtcaaagcaattgccttgttcaagggaactattcttgcaagaatagattcgtgcctcttaggtggagagactacggtcggtgatggaaagaattgggcgttggaagcatcagtgcctgcactcgggagctcgtactcgtccggtaccgagtcgtcgcggaagatctctggtcggttttctttatagagggcaatccgcatcttgtcgccccatttatgccagcatcggacgaaagttgtgattatcagtagcacgacggcgaaatagacaaatccgactccatattttgctgactttgaccatggatctcgctgcatctcagccgcctcggctgtagtcgtcgatgcagtgatcgcaacattgatgcgcttggcaatagtgctcagcattttgaaatgccttagtcggtaccgatagtgatatcttcctgagatttttctagtcagatccatcccaagaaaagtcttgcacggggtaacctacctttaggtatcacccacgcataagaggcttcctctcttatactatagtcgaactgagctcatatctttagtagagctatcaatattgatttcatcaaagtcaaggcaacggaatgggagttttcgagggaaattccgtctaaagtatgaaaaaaggaagcggggagtcacacaagcttgcagtctcggcactgtgatagcctaagcccaacaacggaatattgtggctggtcagacattgacccaatcgaaatcggtgattgcagaccaatttctagagcacaggcgtctcgccatggtgatagtggttgcagtgcggagggatatggtgtgacggtttaggctttagcgctctgaagcccaatcacacggggcgatatcagcaacagagtgattcgatgtgactgagccgcattagcgtggtggagaagatgcagagctcattgatatttttgtcgaagatgctcatccaattataattgaactatgatgcaggtatacaaaatagttcataatctccggctggtcgtgccggagattagccgaaattatggaagccatcacaactatgttgtatgtatgaataggctctatctgggttagcgtctatgactccgtgaaatgctatagcgcgaatagatcgaagaagctgtctatgcggactacatgtagggtttagtagccgaagcggatagcaaccagtagtagaatgtagttcccttgacgatgaactcacagtgatatattgacgaattgtaggaattcagtactggaaaaccagaggtttcaacatttcaacattctcaagactgtcatttccggcattggagctgaggcacttcgtcggttcctgcatcaaatggttttatcatgtagtatacagcagatatctgtcgtataatatcgtgtgatatccagactgaaacatcagacacccctttatctagaaatttgttcttgttctcttctcataaagttgttcctccagggctgctgtgaccccgcgaaactcttggcagataaacagttggtgcctggggcaacagtgacagcttcgaccgccttcgataggaaattattctgccatctcatgcttgtcggctttttctgcatcttcgatcatttccatatcagtctttgacgaaagtagagacgtttcatttagccatggcatcctccactactgccagtaatctgacacctccgtcattgtcccttccaccatcacaattcgctcgcctccaacctcacgcctaccttctcgcccacctctctcctccaccagcgagcaatcaaccctcaatccgcgcgaacggtcgtgtcgcctcacaatttcgtgtcacatccgccaatgccggctctctaactcacacaaacggcagcgcagtcgtacgaatcggcgacacagccgccgtctgcggcgttcgcgcagagatcctacacaccaaggacatcgcttcctggagcgtattgcaggcctcgtcggagcacaatcttgacaattcaaattatgcgggagtctccgagtcccaagatgaggaagatcgaggtcatattcaagatctgaacctactcgttcccaacctttccctcagcactggctgcgcgccaggctttacacccggtgcaccaccttctgcgctggctcagtcgctctcccaccaacttctttcacttctgcacaccacacgtctcgttcgagcagaagacttgcgcatctggtatcagccaccgaatctggagtcagaagaattcggcaatgcgggtgaggggatggacgtggatacagaagagagcgggggccccgagcgggagattaaggctttctgggtgctctacatcgatgtcatgatcatttctctggctggaaacccattcgacgcggcctgggcctctgtcctggctgcgcttcgggacacgaagcttcccagggcctggtgggatgccgataacgaaacggtcctctgctcggacgatgttgccgatgcacgaaagttgtctctgcgtggcttgcctgttgccagctctttctgttcgttcgagggcgacgccgctgctggctggcgggcggttgtcattcccagtgctgaggagcagaagcagaagaagagcgcacagcgaaggtggattcttgcagacccggatggatacgaggagggtttaagtcaagagcgggcttctgttgttgttgataaagagaatgggaaaacggtcattgtgaagatggagaaacatggtggttggactgtggacagtgatgatctgcgccagcttgtggatgtttctgctcagagatgggatgagatgaagcggatattagatcaatgctgatcgatttgatatgccttacaaatgaatgataccactacaagtatttcttgacattttgcttttgggatggagctgtgcatcggactagatggaaatggtggttgtcatgtgaatagtctacaaaatattgaattgatcacttcgctagtttgctgaactcttattcatcatgctgcgtcgtcttctcttcaacggcggttcgttgtccccattagcatccctagaaacagacacctctgcatcctcttcctctgtggaagttgtcggcgaattgaccagcatttcacgtttaggcttgccagggattgatacggtgaaggagatcaggtccgcgctatcacggtccttcttgggcttcttcgtcttggcattacgcccgccttctttcgatgatttcgtttcagatttcgagtcatcaatgttctcttctttgactttcatagcccgcattgcattctcgtcttttgatgcacgcaggtagtcaccggagaagatgcgcataaagaggctcttctcttgagaagaaggcttgtcctcggcttcattttccttcttttcctcttcaatgtccacctcctcggcatcagagaagtcccacattgtgtcaatctcacctcgaataaacgcagtaccccagagcgatatcaaaacacccggtaccaaatagagaagagctggctgagcatgattcgaatattgcatggcaaggagagtggtgaccattccaacaacataaccggctatgctagctttaaagtagatctttggaaaacaccgtgcatcatagtagggaggctgaagttccggctggagtggcttgactggtggcgcccagaaccgctctccccaagcgccgattgctgactgatactcaggcttgacagttgcttggtccgacctttcaagacgtgccatttgagcgcctttccgctggtaataaaggaataggtcgaagcgtagtgacagcccaatcatcattcccggaatgacaatgtcccccagtccaagcatggccaacggcacagagccaggagcatcacgagaggtgggcggccggggaaacaggagcttgatcggtacatccaacttggttgcaacagtgaccatcaacggtgtgaagaagacaaagtagatatcatagaaaaataaggatcccataatgagcgttcctgtccagaacgtggagggagacatgaattgcagggcgccatagcagaagcagaaaccgaggaagttggtcaaccaccatgggttcgccacgaatgcaaagtatcctaccgccgacaatgcaagacttccgctgacgatatcaaggagaccaacgagacatctaaagtcaaataagccacgtatatggcctcgcacctttagacgctggtaagagacatttcggcacttccaaagcagtcctaataccatacttgggagtagcagataacccaaaatcccaggaagaggtgaattccggatagagtgtgacttggctggatggtcctcggatgccatgaaaaggtgttcggactgtttcgctttccacaatcgtccaccttggcgataatatctaggaaacacaaatgaacgaatcatcaatagcacatccttcaggaatgcaaaggcaaagaagagtcccatttgagagaagtagaaactaaggatcttgttcaagatggctggatcttccagccatttgatcaccaagtataaaccacccagggtgagtcccgcagtcaacgggaatatcagggcatctgatggctcaagcccttccatcttctgcaaagggccatgtccttcttcatcatccgtgtcattttcatctttgtccttgtcgctttgtttcttcgcgggtttagcggcggaagaaggtcttgtcaaagaagcatgtgcaccgatccaaattggaaaaagagcggaaacaagtaggtgtccgtaagttggaagaagtggtctcagacggtcgaagtggtagaaggcttgtccaagaagttcggcgacagggctgacgtcggccatggtggacagaaaattgttatgagcacaggaaaatgataggcaattgaagccaggaaacaaagacagaatgaatcagaccataatgcccacgaaatgtgggaattctttgaggttggttaccagcgcttagtgaccaggcacaatttaattcaccgctttctctgaagatccctacaacatcatcgtgccaggcgcccaaaacacatgccgtgtgttggtgagccccaatcaacgataattttcactcaacgataaaattacaaaatcaggtagcttttgtatagtatactaaggaagatacaaaacctcttccttttctttaactttgacaattgtaaattgtagtgtggattattgaatctatagatagggcggtactggttttctgccagacaaattggcccaatggggtcgctgcactcatccgtatcgttggtgatttcgtttctcgcaaactctcagctctgttcctcggctcttttatttacgattctacgctacatcctcatcatgacaactgaggtggcttttgacacgtctatggtaaattgtacttcgttgttctcccaatcacttactaacccatagcaggggtccttctccgtggagctctacaatacacatgcgcccaaggtatgagctcattctatagctcctagagagtcctcactaatgtctttctcttcagacatgcaagaactttgcaaccctcgctgaacgtggctactacaacaatgtcatcttccatcgcatcattcctgacttcatggtccaaactggcgatcccactggcaccggtcgaggaggcagctccatctacggcgagaaatttgaggatgagattcgcggagagcttaaacacaccggcgctggaattctgagcatggcgaacagtggaccgaacaccaacggcagtcagttcttcatcactctcgcgccgacaccctggctggacgggaaccacacgattttcggtcgagtgaaaaatggcatgagagtgatccagcgtatgggactggtcaagaccggtgcggaggacaagccagtggacgagttaaagatcattcgggctcgtgtagttgaagcaggcacacaagagtgaacgtcgtgcgctgcagcttattccatcggattacggtggagggtcatgcacatcaagtatcttctcttgggggaaaaaaaacaagtgttacccaatttgtgcggtgcagttgcaggcacaaccctcggcgcgcccggcccaagtcatgctagagcagcattgtcttgttgttgtctcgaggtgctctatccaagccccctggactctacgaactacaatatcagagtgacagagcaaggtatcactctaataatgagattatggatgtatcactacaaaacgaaccgcttctatcaaatgtctccatcaagagcagcagatacagagtgacaagaaatcttatctaccactcccaaacgaagtccagtgaaggactgcgtcaatgaagaccaggctaccatagtatagtaacccattctgtgcagaacaccgggagtggtatggaaggagaaaagtgttccgccgaaatttctgttcatatagcggtgtagcctaacctcttttggaactgctgagtaatctatggtctcacctaggtagttaagcataacttcccgcctgaagcagataggctctatttggttcggttgtctctattatcgaagtaaaccagcgtaagcatcatctcctggtgttggtagctacacataagatagagcaaaaaataaattccgatatcggtgtgggtggctcgcttacatcaatagaagttgttgcgacaatcattcatttttcatcttcccccttcttgatcgaggagatagaggatagctctgctcagtgccgctgaatgacactgccatggtcttcatcttcatagttgcattgtaacgactgaccgtgcccgtccgctctgcgaaaggcgaacgaacatctggtcgcaattatcacccatgagacgttttccttgaccattcccaaccgtttatattctttcaatgaccgggttttcttaaagtatgcgaaactgctcaggttatctatatgccatccaagctttcaactggtgaagcgattctagtatgttgcagaatagctcttcctcctgtacacctggagtatatatattttcagaggcatcctaaactatccaactcgtagacaaacagagaaaagtcaatgtaggagatactcaaatcgtataattcccgtaccattcatgtcactgatgaaaagccgagttcattttaaccacgccgtacatgtgttttctttatgcaatgttcttcgacgtcgattttagtcctatggtctctaagtggggactaggtgaccgccttcgctcacttcccgcgtttttctccttcaatttttttattctcttcttctttccccccaaaactcaagtttgtgggatttccactgtttgagcttattggaagactgagaatgtttcagtggcattaaataatcatctcccaattctcaacctcctgagagcttgagctgccaaatttggctgtaatactcaaacttacctgcagctagagcttcctgattttcataccatggaaactctgtcagacacgacttgggatgtgatcattcttgggactgggatttaccagtcacttctggcactgtgagtgacttttctagggtggcggtgagttgagcactcacactcccaaagggccctctcacgatctggaaagaaggttcttcacatggactcaaaccagtactatggtggttcagatgcagccttcagtcttgatgaggcccagcagtgggtagagaaagtcaataaaggtgagttaccctttttatggctggttggctcatggctaatattatgttgccaaatagacacacatatatcaccgttcaaagatgcctcaatcttcaaacaggatgcaccccctttgtccgatgatacaagcatttctcccaaacttgcatctagtcgtgcttacactttgtccctgtccccgtatttcctatatgcccgttctcaactaatgtcagcgctcgtatcctcgaaggtctttcgccagctggagtttatggctgttggaagctggtggatttacgcccctgaacagctagagtctgaaaatgacaaactcggtgcagaaaagattctctatcgcgtacctggcaaccgggaggatgtgtttgctgcaaatcatatcagcatgaagtctaagagaaccctcatgcgattattgcgtcatatcacgaaacccaatgaggatgacgcttcaaatgaagatgacgatatgtcaatgtccttgagcgattatcttgcttccaagttcagcgtcccggaggaacttcacaatcctctgctgtcgctgtccctgtcgcaactttctcagcatgatacttccgccagctatgctttgcccaggatccaaagacatttgtcatccattggccatcttggccccgggtttggagctgtgattcctaagtatggcggtggagctgaaatactgcaagctgcctgtcgtgcatccgctgtggggggcggtgtatatgccctggatacgcaggttaatgattgcttatggcgcacaggctctgaacattccgagtaccgttttctgttggaactggccaatgaagggtctgttcaggcgaaatacttgtttacctcgatgtcggatgcctgttctaaagagaggtcaacacccttggtcgaggttgcccgttcgatcagcgttgtgtcggctactttcccgtctcttttccctctaacagttgagggtgctcctgtgcccgcaactgcagttctcatgtttccaggggatacgttgggcagcccaaattcgcccccggtctatctccaggttcattcgagcgacactggcgagtgtccacagcagcagagtaagtcattccctatacagtccagcatgatatcccctcccgcccgctcgtatgatgatttttttcaaaaacttatctacattgcctgaacttgctatgttgaaaaccttttcacctgatcacgagcactctccaaatttgtttcttcagcaatattgtcgttcatatggctaattgcatgtcacaggtgttatctattgcagtgtggcactacctgggccggaaggccaagctcttatcgagtctgctgtggatagactaattcgggcggaaggtatctcggccaacgtgctgtggtccttgcgatatacccatagcggctgtatcagcaatggtgagccccggcatctcacggtcggggatggagttcctgacggctaccgtttccctccgtcgagccttgacttggcattcgaagatgacactctcgaccttgtaaaagaggcttggaagatagtcgtaggagatgaagttgatgatgccgattttatgatgtttgacgatcgcgatggcacttctgaccaatgatccgtagcatgctttttttatgatcatactattacccatatttccctacagaaatagttgatgaaatggtttctgttcgtttctagggaggatcgttatataaagtatctaatgctctaagaatcctctacaaagttatcgatttactgcccaacaatctcacacggtgttagatgttattatataaaatatgtatgctgtaactaactagttatggatcgcatgtgacgcataattaatatcggcgcaaagcagttggcagaacgccccatacgtcatgtcatgttaacctgattgtcgatatagatcttccgaatatctgttgttttcttgaacgtagattccaactaatctttgctggaataaaacttctatcctacactctcatcgatcgcaaacatatacctatcctcacaatgccactcgataatgtcaccggcggcgtgactggacagcttcctgccgaccaggcccaatcaacaacaagcggagtggtcaagaagagcgtaccaaaaaagctccaccgaacgacgaaggacttgaccgaccctgccctcccaggtcaatttccttccgacgatgctcccccaaaaggcgagggaatcgacaatgatctctcgttttcatcgatatggtccaccataacagcatggttctctacactattccctcgcgcctttgattatctcgagtcctacattcagggactggtcgcctggctcctccctccaccccgccaggctgcgttatatgaagctgcactgaagcgccctgccgcaacaaccttaatcgtttgccaaatgatttgctgtggagttcctctactggtgttcttggctggcgtgtttgtctttgctgcggtgtcgatattgctctgggctattctgtccttgctcattcttggtccggtgttgttggtcacaagcatgatgggcatgtctctgtggggctggggttggatcctctatgggttggtcaaatggattgatcggcgattcttgggtggcataattgcacgcttttggctttctcagacaaattcggagtcagacgatgtagaggatgagcccaaggaggagaaaaaggacgagtaatgtttgcgaatttctcggagtttagaggacatgtgattctgtattctgaattatttagggcataaaattgacattgacattgaacactgaagagcacgatatcttattcatatacacgctcagaatattcgaagagacacaaatggtaccccgatgaaaccctcaggcatcgtatatgtgatgttgtaaaatacaaattcgttgacagagtgatcggtgttgtaagtgatcgtatatttaggttgcgcgtttgtcaagaccttgatgttcaaaccaggtagaccttctagtccagtcacattgaacccgttgttgactgtgaggccactgaacaagaagttgaaagaaacaggaccgtgtgtagatgttgcatttggatatgagatattcaaagaccgaggggcggccacagcatgaatagatgattctgtaacccaatgggaaatgcagccaattttatgatcatcaatagcccactggatgactgcaggattgaattgactggggttgatactgggacccccgacaactgtctcggcaacagtttctgcaccaatagtcacgttcttggacatccaagcagtgatattgcgaggataagtatcaaagggcggcgagtaagcctgcgaggtatacatatgctcgccagggaatttgagcaaattttcctttgcctttgcaggtagcgatttcaccatttcaggcattgacagggcgaatagaggatagaacgccaaatcatcttgatgaaacatccccagctcctgctgagggacgggggcttgttcgcggccaataacaccccaaatgacagcaccaataagagatgcatactccttcatatcgtagccatatgagcgatcccaagggccagcaacattcttcagattcgcattataaagctgagcgagttcattccagctgtatttgagcatctccggtccatacttcttcaacaagctgtcacttgtcccatactggttccagagcgccagtgcccacatggcaacaccagcgtatgtcggagaattgaattcagacaatgtgtggtgcatactccagaggtcgtagatttcctgtgcgaatttctcaccagagctggttaagtttgcatctccgactcgtgcaccaacccagttttggagaatggttcgcatcaaccagggattggagtaacaagggtaagaattgtcgccatcaactcccccgacacgatagagatcacccttggctgcgatctgcagggacttttccaccttggagaccgtcgctgctggaaggagatggccgtaatcattcaaagccacaatccaggcacatcctacaaaatcgcggatgtttggatcccactgaccataattatattagcgaaatagtggattagactaggcataatcagcttaccgagctgtatgggccatcattgggatatttcagtgtcccaggctccggttccgaaggtgcttgttgataatcgccataccactgtttagacggatcgacatattgaccagagatgacattgtcgaagatgcggacggcttttgcaacatcgccgggtccgtttctggctagcaactgaggtgcataccaggctgtatgccgactatcatagcgtcccggactactggttgaggtgatcaaatagccggtctcgttgtcccagtatttgtcattccattcaatagcagcattgaacatttccaccgcgtgcgatgacgcaccaaacctggatgaccagctgtctagtggagcagcagagacgatcccggtgttatggacggcattgaatcctagaaggacgagtgatagcttcatgatgtgttggcaatatgaaaatggcaggcaaagagtgacttgcgaaagaagctcaatttctttcgctcaacttccccctgtgcctttgctgtatttatagcattttcaatttggctttcggcatatctcgtcaggtcgattgcattgacactgccgatgcctagcatattatgtttatctcagcgatatccaaacattcagaccccggtgatttcgccgtgatctccgaatatgccggttgctatccagagaatgattcaagtattctcgccatcttacactactctcacccttatctttagtgatcggcatccggtaattcctcagcattgccgatttatacccctccctgaatccttcagagcttccccgcaaaagcgaaaaataattccacctatgatcttatacaaagccgcagaaaagataagaccagctccatttgctacacatataatataagtataattacttgagccacttggaaccgaaagcgataatctgataccgagtcacaaacaatacagagagcgcgagaatcccaacgccaaaggcccactttgagtgagcgaaagtcgtatcattgccatcccgatcaaatggcggggtgacgggtgccatcattttgtgagccttctgaaccgagtaggggggataccgcgcagcgagaagcccctccaaccatgaaggcacggcgttgatatgcgtacggagatgagagaaagtcaagataccgtgcgggccatgatagcgaccatggccggagttcccaacaccaccgaatggcacatcgcgagcagctatatggagaccgcagtcgttgaaggtcacgcctccggactgggtttcgttcaagatgcgagccttttcggattcttgagtagtgaatgcgtagatcgcgagtggatgctctcctgaacgcgtccgagagagagcagtatcgaagtctgcatcaatgatggggagaatcgggccgaaaagctcttcggagagaagggaatcgccgggtttaacgccggtgatgattgttggtgcgaagtacagactttgacgatcccgctggccaccatagacgatttttccggaggtctgttgaagtagattgtcaaggcggtcgaagttacgctggttgatgatgtgggtgtaatgctctgcattgtcggctttgcctcctaggaacgtgtcaaagtatcgaatcaaatcagcgacaaggcgttctcgtacacttgggtggactagaacgtggtttacattcaagcaaacctgtgttcagtcgagacgagttagttgatgactggaacgtgaatggtgtgagcctacctgtccagcattcatgaatttagtaacggcaatgtgttttgcggcgagatcgagattcgccgattctgcgacaatagcaggacattgaccacccaattcaagtgtgacgggagtcagatgctttgctgctgctgcatggatgattttggcaatattgggagatccagtgtagaaaatgtgatcaaagcgatgctcaaggatatatcccatttcttgtgggccagcggaaatacaccggatcgcatcttggtccatgtattggggaataatttccatcaggacatcttgagtggcacatactacgtccgatggtttgagaatgacggcacacccagcagcaatcgcagcagccattggctgcaggagcagactgacggggaaattccatgcgccgataatcagagtcacaccaagaggttccttgcggacagtggctcttcctacgaagttgagaggatcggatttttccggtctttcatccttcgtccactcatccagttttttgagggtgcgtagaatatccgcttggatattagcgcagtcgccgatgtaggcttcttgatagtgtttgtgtagatcgatatagagagcgttgcagatgcgcgtcttgttgtcctcaatcatccaccaagcccgtttcagttgacgacgtctccattccttgctcttggtggtgccagatgcaaaagtaccctgtacaatttgatacgcctagaaaatgtgaggggtgatatcaaatagtatatggatgagatttacctgatcgaactcggccgtagtgctgaaacccatggtgagctgtagagatgtggagaggtgggaggaagacgaggttatggggaatactcacacagccgtgttgaacatgacctcctgaggaccctggtctaagactgcagttcattttataaatatatcatgcatgattccgtttggttaatttagattgaccttgagatttttatggtcgcgaaatgagtctcggggtgagatttgtacgctccccgaggccgaagtgcattattattgcattaggaaatagaatcgccatttccctttcctggatgtcgaagatatctactccgtagagtatgccgatctgaaaactaggaactggatattctcgttgaaacgtcgggtttggccatgctaatatgcacagttggggttctatctactatgtagtctataactatccagtttagatatacaccgaagcctgcaatagctgtttttatagcatttgccgtctgttcaatcatcttagcatcaataagctacctctagcctagtaggagactctagattccttatccaaagccccttttgccaccaccaaaccctttagataaacaccaaagtgggtattccaatatcgcagcgaatagaaaccaacaaagataggaatgccaataaatacagagacacttatctccttggctcacatataacaggggagctgctcctccactcatgcggggtagacgttgaacaatgactgcaatttcgagagctcgtacaggttgctggacatgtcgtgcacgacgtatcaaatgtgacggtaatttcccatcaagtcctgcatcaacacagtcctaactgaaatcttggttagaaacccatccaatttgccgtcgttgcgcccgtaacaatgccccatgcggatacggacttcgtctggtctggcacgaggaatctttagcccgaggcatctgtcatggaagagcaggggtatggtccaagcgaaaagatattcgaaagagggaactggaacaagtagaagatacatcatcgccatggacggagcatacggccgaccggacttggatgtttctgaacacgacaatgaccgatctccagatccatttcgatggtacccagcccaattacaaaggcatgaagccaatttctcaaccaagcccgttgtcgccttggctgaataccatagctcctggccagcgatcagattgcgatccggtgcttatgtcttatttcgaacacatcatctgcagcagctcaactctcgtcgatagcgcaagttacaatccatatcgatatctcatactccctatggccctacagtctgagggactataccacgctgctctagccatctcagccaataccctcaagttgtcggatcagcgataccggcttccggcattggaacatcatcaccgggcactaaatcacctgcgcggtctactgaatcaagacagctggacggaaaatgagctggatgaaatgcttgggctggtcttgatgttatgctggttcgatgtaagattatgccttgcttcctttactatgagaatctcctaattccgttgcagatatcagacagcagtcgcccttcatgggtcacccacctcaacggattccaaaatttaatgcggacacgaaaagaacgccccggtcgctcatgtcacagtcaagaattggcaagtttcttcaatcgttatttcgtcttccatttagttctagcccgcactgcgtttcggctcacccctgccccatcccatatatcgcctctcttgccggacagtatactggaaaaatcagacatcatcgatccgtacatgggattgagccccgctctcttattgatgatcgatcaagtagccgaactagcgtggtctcgtgaggatggcaacataaaaatcaaccgtaaagatgttcatcaactcaagacggacctcgatagtcttcaacaaaggatacccacagagcatatcgatccgaacatggagtgtgcggcaatcgcagaggcaaacaggctcggcgcccttcttcttttgcacgaaatctgttcgaccaaagctccgattaatcgctccggtatcccgacattggaatccgaagagaagaatgtttatgttgaacggatattgaccctgatgttggaaaagaagggaaatatgatgcgaactgcagctacgcctttatggcctctcttcttggcggggtgctgtgcctgcagggaagaggagagggtcattgtgttgcagttgtttaaagagctggagggtattcgtcgattcggggtatgtataatcttctgtctctttctagttgattgactaacattattattccccagaacattacccctgcgattgaagttgtcgaaatggtctggcgccagcgggatctgtcggtgcaagatgaaagaaaactccagaagaagcttaatgcacagcggcagaatgatcccctgcatgagagccggttttcgtgggagcatgctatggtcatgctgggtgggtggaagctcagcttgacatgagcttttatgtgggtaatgaagggttttattatgttcttgtatatattatttgagggatggtctcaatttgtatagcccgcagtcaaactgtgtttaattgttcgacttcttgcacctttcatttagacaaatcatagtttagaagcatggcttctttcatgtgtatgtctacccttccaccctgtaaggtcgctcaactccatttccggatccaagtgcgctaggttcttcgcagtactcttttgtccagccctccatttccattgacgcacaatatcggggtcaagagttccctcgagcaaatccgcgacatatttcccaacgacaggaaggaacttgaacccatgtgctgagccaccggttgccaggaagagactttgatgaatgggatgaggcgtgacaaggaaatgccgatcagctgtatcagcatcccagcaaagccgtgtatagcagaagggtctgtctgcaagctcgggaaacacgcgccgtaaattccggcgcatctgagcttcgatctcgagagggaggccatcggtgggtgcctgcacgaaggtgtgtgggacagaagtggtgataccagacttggtggtttgcacgttggtgatgaattgactgtgagccatcttgaatatcccatcttcaagaggtgggaagaagtagcccagctcgaggttatccataatgggcattgaggcatagtgtttcgtttcagaaggggtgagctggatatgagcgacactgtgtcccttggcagtcaactggtccttcacgtctagcagtgaaggtgtccacgcgcctgcggctaggatgaccacatccgcctcatgtctcgtgccatccgcagtgacgactcccttgcactcgcccgtgatatcatctagtatcaactcctgcaccctcccctttgtgtcccccgaaatatattccacccctttctcctgagcagcgcctgccatccgctcgatggctgtaccagaagctgcccacccggctgttgggttccacacattgatattccacccgtccagcttgcccgtgacaacagaccagcgagcacggatctggtccggcgtgagcttctcaagaccctgtactccaagcttcttgcatgtctcaatcgaaccctcgacaaagggccgggacaggttcgctgcgctcaggatccacccggggacatgatagagcccacgaaacagcggccaagaccgccacgcttcgatagattcaattccaagacgtgcgtatagcggttcgttgtaatcgctgcggatgatcttactgatatcggtggaggctgcttcgcaggaggggggtgcgtatgggtcgagcacgcggatggaggtgtagccgcgctgtgaaaggtggtatgcggtcgaaatgccgaagcagccggcaccgacaatgaggattcgcgtgtctttttccatcatgtgagctggattgttgtggtgactaggtttgacttctcaaactttgagggtggcgtcgccatatttattgaggcatttccgccttctttcggagaatctgatttcgctaccagcttcctcatgaacaatcaaaggtatcatggagatggtctcgtgtgcggggaaataatcgactgcttcgttccgaccttccgataaaggtctcactgcccggagatactcggagaatctccgagtggatgctcgtttcgacctgcattcttttacctttaccccagcatttcccccaactcaaagattgcccaggtgcttaatcttatttgtttccgtggctctgggatggaaggaagtatgccaaagataacaacgttctctcgggcgacaatgaaatgaatggctgatatcgcagaaaattggctaatcgtacaaagtgtccactaataactagatcattcgtgacaaacttcttacttggatatgctgagagcttatagatacacaggtatcatacttattaacctatagacgttttaacggtctacgggtctaggtctagaatatcgagtttcttctgaatcataggttgtcctctagaagagatagacaatcttggcttatttcagagtgatatgataaaatattgactaattcctggttcaaagggtacatgtatatcagaattgccattcattccattgcgtacatttgccactctatccatacagtatccttatcaacagtaacccacatctccacacacatcccaaggctcactatcctaataagtataccggaaagagcgtttttctttatcagtcagatccgagaatgcagcctcggatatctccacatttgactcggcttccttgtcacggcggtagttttcccatcggcaaagagccccataggaaataatggcaactatagccacaacaagacaggccagaagaccctcatatcctcgagagtaggatggtgcatcatcggaacggaaacactggggaccaatgatattgccaatacaatacgccaagaagaagatggcgttcatggtcaactttttgctatggccactggtattggccattggaagtgaagttgacaacacgtacggcgcccagtaggtgtagaagacatagtatgccgccagaagcccatgctggttctcacgcggcagcttccacatcagaatagcgcagatcatggggaccaagttggccagggcgataatggtacaacgggagttgggcacgctagcagctaggaagcccagcatgatctgccaaaccgttgcaagcacaccggtggggataccaaggacggtggtgatcaatgaggaataccctagacccttcacaatgatagccgagaaagtcaccagaccaccattggggatgttctgggccagcgaaaacagcgccagaagccaagtcttggggtcgagtaaacactcgcgcacttggtaccacttgatggttttgtcttccatgccggtattgttgtctttgacgcgctcgaggcagacgaacttctcgcggtccgagaagtaccagcattgcacgggcgaatcgggcaagaatatgtacaaaacgacggaccaaaggacggagaatccacctagcacaaggaagagcaatctccagggtcctaccgacgtgttcgtttggccgataccatagctgatcaagcccgagaagacggaggagagctgattgaaccagaatgcgacacgaagaggctgctcgcttgtcttccaccacatgacagtcaaaatgctggagattgggaacacggcggcttccgtcatgcccattaagaagcgcacggcggctaggcccccaaagttctgcgttgccgcagtacacaacagcagaattgcccagcccaggaccatgcccacatacaatttagccacaggaagccgctgaatgagtaacgctgtagggtactcaaaggcaaggtatccaaagtagaagattgagcctacccaagagtactgatcgccggtcaagtgggtatctgtcttcatgccgtagatggccgcatttgagatgatgactttatcaatagcggcgagaaccactgtcaccatgatcaagggaatgaggatcagatcgattttccaaagcacacggcgcgcttcggcctcggtgacaggttccaccgcaatggcagggtccaggtgagcgaggaagtgtgccgcaacatctttgccgttggttttctcttgggcttcaaggatttctccttcttgggccttttcgtgatcaagggcgagttgaatctcgggagggttggtatgtttttcgtctgccatagtaaaaagggtgtatctgtatcaggaggtagaaagggatgcgtacacatcgaaaacgaaggagatagtcatttgggatggttttatactttggaacatcagagtgaaagataggtccaaggttacccagacggttatcatggaaagtgaagtgaacgaaagtttgggtgcgccaggaaggtcggaccgactgataagcgcatctccacgttcctctccccgctctatctcggtgttcaccagccggtggattagattgtggcgttctttttttcgtcaagttacttcgcttcgacctgctgattagttctaatggagctaatggagcttcataaaaggaagctttggtccttgcgttctcagggtatctgaacatatcccatatcatgtctacccaattaggtgccccaagcatcaagatcgccatcggtgagtcacttgcaactttataattcatatgatatagcaaggtgttaatatcccttctagatcgtggtggtactttcaccgactgtctaggtattgttgatggtcgcgatgaggaaatcgtcgtcaaactgctttcgcaggatccagccaactatgccgatgctccgattgagggcatccggcgtattctggagcaagcaacaggcaaaacctttccccgcgatcaaaaactcacaactgccgacttctcggatgttagcatccgcatgggaacaacagtcgctaccaatgctttgctcgagcgcaagggagaacgtcatgcactcttgatcacaaagggcttcaaagatgctttgcgtattggaacccagtctcgaccaaagctgtttgcactcaacatccaacgtcctgatgttttgtatgaggatgtggtcgagattgatgagcgtgtcacaattgaggattatcaacagaatcccaccccggacaaagagagtctgcaaaagtctttgcaatcagatgcctgtttgaaaaaaggtgttagtggagaagtggttcgcgtcttggagcctcttgacgaggaacgtacaaagcagagccttcagcagctgtatgaaaagggctatcgctctatcgcggtctgtttggttcactcatacacattccaagaccatgaacttgcaattgagaagattgccaaggaaatcggattcactcagatctccctttctagccaactcttgcccatgattaagatgacatctcgtggtgcttcggctacggcagatgcgtacttgacgccagtcattcagcgttatattcaaggcttccgctcgggtttcaaggacggactgagctctgccaatacacgctgcgaattcatgcagagtgatggcggtttggctaattttgaaaagtatgttgacattcaattactaggaatgtagaaaagaaattttactaatctcttatagattcactggtcttcgtgcgatcttgtctggcccagcaggcggtgttgtgggatacgcgggaacttcattcgatgagacagatagaaagcctgtcattgggtgagtctaaatttaccttattctatgaggggatcatcaactaactttccagattcgatatgggcggtactagcacagacgtctccagatatgacggaaagctggaacacaccttcgagaacaatatctccggtgtcacagtgatggcaccccaattagacatcaatacggtagctgccggcggtggtagtattctcttctggcgacatggattgtttgcagttggtcccgagtctgcaagtgcccacccagggccagcatgttaccgcaaaggaggccctttgactgtgactgatgccaatcttttccttggccgccttcttccagcatacttccctaagatcttcggcccgaacgagaacgaagccctcgatgtcgaaatcacgcggaagaagttcacggagctcgcagagcagatcaatgctgaaaccggacaaaacaagtccccggaagagatcgcgttgggcttcattcaagtagccaacgagtctatggcaaagcctatccgagcccttacagaggcacgtgggtacgatacttccgcgcataacctggcctgcttcggtggtgccggaggacagcatgcttgcgccattgcctcttcgttgtctattggaactgtcatcatccatcgattctcgtctattctctctgcctacggcatggctcttgcggatgttgttcacgaggctcaagagccagcatcaggagtgctggatcagacagccatggaaagcatcactaagcgtatcgctgcgttgaagtcaaaggtcactactgcgttaaccacggacggcattgatgaaactcagattcagcatgagatttacctcaatctgcgataccagggtaccgacaacttgctgatggtgctcgaacctgaacacggagactttattgctgagtttgtcaaagagcacgagcgcgaattttctttcacattccccggtcgtaacattctcgtcgaagatatccgagtccgaggcgttggaaaggcaacctctattgcgccagaggcacctcaacaagaactcaaatcagtcagcaaaaagcccgtgggcccagagaagcaggatgattcatcttctgtctactttgccggcgtcggtgaagtcgctacgccggtcttcttcctggataacatgcaaccgggatatgtccttgagggtcctgcgatgatcattgataaaactcaaactattgttgttgagccaaatgccactgctacaattctgtcccggcatgtgatcttggatgttcaatcttcgaagaagcagactgcggatgcaacagtcgtggatcctatcagattgtctatctttggtcatcgcttcatgtccgtcgctgatcagatgagtcgcatgttccaaaaaacctccgtgtcaacaaatatcaaagaacgactggacttctcctgtgccgtgttctctcccgatggaaaattggttgcaaacgcgccgaatgtgccagtacatctaggaagtaagtcatccccatttagaaaaattctcttttgaccaagagaacttcatgctaatttcttcttcaggtatggagtatgctgtccggtatcagcatgagaaattcggaggcaatttgaagcctggcgatcacattctcaccaaccatcctcttgccggtggaacacatcttcccgacattactattatcactccagtctgggatggtgagggcaaaaacattgtcttctatgttgcctcccgtggtcaccatggtaagcatgaattattctcatttcccttcactatttcactatttgtcgtgtcatgctaatcaaaagcagctgaaattggcggcatcgccccgggatctatgccttcaaacagcaaaatgctgtacgaggaaggtgccatgacaatgggcttcaaggtggtatcagaaggccgctttgatgaggagatagtccggaagttcctatatgatgagcccgcttcgtatcccgattgcagtggcacccggacatacaacgacaacgtttcagatttgaaggctgctattgcagcaaaccacaagggtgcacagctcctggaagctctggtgatcgagaacacattggaagtagtccacttctacatggacgcgatcaagcgcaacgcggaggttgctgtccgtgaactgctcaagtccattggtcgtaagaacaacggcgttcctctccgattctctgacttcatggacgacggcaccgagatcaagctggaaattcgcattgattccgagactgggtctgccgacttcgactttacaggcacgggccgggaaacattcaactgcctcaatgcccctaaagccatcgcccactcagctatcatctatagtctgcgggcgctgatcgatgttgatattcccctcaaccagggctgtcttgccccggtcaatgtgataattccctctggtacacttctcaatccatctgggcatgccgccgtctgcgccggtaatcctattacctcgcagcgtattacagatgtcgttcttggtgcattcaatgcctgtgctgcttcacaaggctgctgcaacatcatctcatttggtatgggtggcgtcgatcccaagaccggcattgaggtacctggatttggcgttggcgagacaatctgcggcggctcaggtgctggaccatcctggaatggcacgtcgggcgtgcatgtccacatgacaaacacacgcatcacagatgcagaggtctacgagctacggtacccggtcatcctccgcaggttttgtatccgagatggctctggcggtgttggtcgcttccgtggtggagatggtgttatccgtgagctggagttccgcatgcctctttcggtgtctatgctaagtgaacggcgcgtttaccgtccgtatgggttggcgggaggtgagtccggacaagcaggcttgaatctttacctcaagaaggagctcgacggaacggagagaatgatcaatattggtggcaagatggagcttatggtccaacctggggagcggattctgattcatacgtgagtggtctacatctttcctccttcatctgaatatatatgctgacaattcttttgatttagacctggaggtggtggctggggtaaggcatccaacgatgaactagtagcgagtgacagcaagagtcatcagaactcttcggctttccagccccgaggaagtgtgcatgcattcagtgtcgctgccgaggcggcaatgtgacattgggatatagatgaggatttttgaatcatgtagccagagatttgcatttttgatttaacattatgcagtgatgtctttcatgaattattgatagtttccttgtgcagatataaaaacttattagcagaccatgactaccgctcgactttagaagatcccaatgattcttttcactgttactgtaagtcttctcatttagcaagggtctgattcttcgtccgtggttcaatctatcgcattggcatctttgatctgacataagagatgcaaatggtcgtactgcttctaaaatgctcaataagaccgaagtcgccaaagtgctggagaatgcacataaataggaaaataacaagtccatcagtactataaggttgaagttacgaagagtcgtttcggttaagggatgctatgagttcgaactaatggaggtaaaggtcacaggagcaatatgactgtcttcaactaaaagtgtgcaagtcaaagaatgtgcctgtagctatatggcccccacgtgaccgtagcccggcgaaccagtgtttaccaaaagttttggctccctcgatgcccgacaaatttattctttcgcgcattcatctcgcagaacctccctttattcaactcttacttccgcacacatattgactccacatttactcaacctcttgactgcatcccatctaccgtcatggagtaccactccgtcccaccggaggaacgtgctagagacgaagatggcaacctcctcccttggggttatgtttacaaagagtatgttcaatgtatcgtgtagctcctcttttaccgaagctaacaaatatgtctcagtgaatctcgcaaccctcgacgaccacccgaagaatcaggaccattcggcaagagaagaaatgctcgatacgataatgctcgctcacgaacacggactggaacaccagcaaagcgcgagaaccccaatgttgctgagtttggtcgactattctcacagcaacaacaggaggccgagaaaacacacggcttgcccaagtcatcatcatcatccagtcttgacaatccacggaagcaaacagagaaggtcgcaaccgaatgcatactctatgggtacaaaaacaaggacaacgagtggaaggtgatcgaaaaatttgagcgcatctcccaaggcacgatctgcgaagactaccctcgcaacgacccgaattcatcgatcaactacacccatctattgagcgggggtgacgtcgtcatccgaaacctgtcggctgatgcaaatcgcaagtcgaagcgctatgccggtggataccactggatcaaggtcacatacgactcgacccagtccgcagaccgcgcgcgcttctactcgccacaggaaattgatggccacctggtcttttgcgagctgtacaatggccacggcccagccgaagacgccccaatccctgcagattctgttgccagcagtcggattcgcaacaaagcaccgcgcaccttgaccacctcgcactcgaccgcctttctctccaaccccagcaaagatcaggaccgcatgacattgcctcgatcctttgccatgaacaacctttccagtgtaccggatatgccagaagacgaaaggcactcggtcgattcttcaacggtcgctggtacctccgacgatacaatgacatccactactgcaacctctgcaactgccactgccacaccctcgttccagcaaagcagtttcaatacaacaacttcttcgtcaacatggacgacaggagcttcgtcaagtaacgatcgcgcctcgatccaccaacgccgagctcccgatcaggccgaacccaccgccaacaacgaattcatgacgcatattccgactgtccgtcgcaccaagctgcgccctatgctcgaggcactccctccacagccgaccatgactgagcgcatcctccgctcaatccccatcctgagctggtttacaggtgacattgtgggcgagggtccggtgctccgcgaggatggcacgttcgattcggaaaaatctggcatttattggaggttctggcatacgttcgattatttcatgagaacggatatgtgcggactgaaggaggatagttgaggcgacatgaaggccattgagcactatggaaatggaataccttttcgtcttttgttattcactacatcacggatctttcgccccaattgcgaagtcttgcgcgcgatgaacctaaaaaccgaatcgctacgcagcttgaagggccagtcctcaacaatactgcgcgcgtcgcgcaaggcatgggggtcaatggatttgcggtaaaatggataatgtgtacgatagctgcgtcagatgcagacataatgaactgtcctgtcgagggaccgcgcaaaattgatatcccgtagaacagtaacaagtacaattcctcaaacttctgcttcaacaacttttcgggtggttaatcctcgagctgtcagaagtaacatccccctttccgtcgccgagtgcatcaacaacgctggcacgttataaacccatgcatcaaccctgcccggaggaagagaccaaacagccagaagaaaaaaagagaaaaagaatcaacaaaaaacaactctcaaaccagagcttaaatttcattgatcatagacgaaagtttttaaagactcgatttagttcgcatctaggcgtgtttattccttagtctcgaagttctcgccctcgacaaggtcggggatgtcatcctcctcatcgtcctccttcttatcaccctgctgcttctgcatgttctggtagctctcggcgagcttacgcagggaagcgagggagtcggggccgagctggttcaggatgttggggacgagctcagtgagctccttctcctcgccgttgccgtacagggcgaaggtgttggaagggacggcaccgtggactattgcgatgaagtgattagactttttttgttcttcttctttccttcttctctttgttttgaaaaggtcaaggtcgggtttcggggtggtttctactcaccacgggggttggcgaagtggatgacgttgccgtcctccttgaacatgttgacctcctcgataccctggatgggctggacgttcagcttcttgagggcggcctggagcttcttgtcatcggcgccggagttgcggacgaccttcttgaccttgcggcggggagtacccttgccactgtaagattgttagtccgagttcgacattggacggttgaaaaatgtggtatcggtgtgggtaagtgggtgaatgtgtggtggggggatgtgaattaggaggggtccgaaaagatcgaaggaatgcgaggatgacagggccgagagtcagactggattttctgaggcatgcgatatgcgatatctatgttcggttcgaaatttggatatagtgcgtcgcatagattcgagaatcaagaatccgtagtctgactatcggcagtgtcgaatccgagtattgcaattcgaaaattcgtttcattcgtagggaatcgagaggttgggataaaaacaatgctggatagaatatacataccctgtcaagaagaatcatgttagctatcaaatttgcacagttcaatgtccaccaagacatgtaaattgcagttcttgagacatgaccaagctccagggcgaccgattccacagaatcgcaactccacgtcattgcccagttcatatctcaagctgagatatgatttagaatagagagaaacataccgatgcgaacgctcgcctgcattctagccaactttgcctgatccatgatgaagtcgggaggggtgatcgcctggcgcggaattagctggtgattcggggaaaatccaagatttagagagaattgcagagtcaattattctgacaatcaatctctattgcataccgttaaaaaggagttgagggggagatggtaggaggaaacgtgaagtggaagtgggtggaatgatgatgcatccccaagagttttgtgtggggagttagccagaatattcgctaatgcgccgatttgggttaacgggctgtttgtgtttcaacgtctacacttctacatgttttacaaatcgactcgatcgcgataacactctatttgttgttcttcctggtgattttggctattcgcaagttccagggttgttggattgtgggatatttggtgctcggctaaaccctaatcgggctgtcttcggagtatatgacgaacatgggacttatcctgacgctttgcacccattttcattccactatacgctgttggtcatgttctcgtggatccccggcttgcatctcgcttggatgatcttgtatgtgccctacgtgttcgagcaaggtctcattgtctgggacgagcatgttgcgcgcgtaacctgcgaggtggactccagcgtctgggtgtggcaggaggtcttccggggagggcttgcggagcgtccattggccgggcacttatctaggggctaggacagcatgaccggcatcgaaatccatgcttccggctacgtaaaggcgggagaatggcagcgcgccttgcagaacaatgtgaattgtaaaaagcagagcaaagctaagtcgcagataatatttcagtcatattatacatccatatatacacccatatatatatacctcgatggttccattcattgcttcgaaacctgagtctcggtccaatcccagagcttgtgagccaattgcgcgttctgcgcaggcgcagtgccaccactgcgatacccaacgggagtatagtaagctccattgatgagatcctcccttggcgtgccagccgcccaaagagaattcagggctccactagcgacacttcggaagaacgtggaaccaacagctgtcagagtatacttcatcgtcgagttaaggttcttcgcatatctatagagcccgctgtcaaccgctccgggatgcacagcaatagacaagatatcaggatgccggcgggctagctcggatgcaaagaggatattagctaatttggaagcgccgtaacgcgtccaggtactggcagctaataagccaggggtagatgtaatttcctcaaaggtggaagggctaacagcgagagccgccgaagcgacagtcacgacccggacatcggggacctcacccttggcacgctggagatcagcggtcttctgcagagtaggcagaagcagttttgtgagcagaaagtgaccgatatggtttgtgccgagctggacctcgaagccctcctccgtcgtagtaggcgggttgcccatcgtgcccgcatttaggattaggatatccaggcgatcgttatcggtctggaacttgtctgcggcggtgtggatagatttgaaggaggacagatcgagtgcgaggaagcggatatcggcgggggaggagagctggctttgtagcgattcgattgcttcgcgcgctttgctctcggtgcgggcggccatgtagatgcgtgacgggcgatgcttggcgagttgaaggatggtctctttgcctaggccggtattgcctagatcaatcaatcgcggtgtcagtcttctagaagctgtagatagatagaaagaagacatatattgtacctcctgttacaagcacgaccttgccgtccaggctgcgaatgtcgcgctctggctggaacgatgccccgaaatagccgaaagtggcttcattcaaggtcgggccaaagctcgacagtgcctccagaggatgacgcaagctgtaggtcgcaaagccacgagtggctataatatcacggagatccatagttccagatccaattggagaatgtgaggggttgtagaagttggaagcaggttagctcaggggggatttaaagtaggaaaagtcaatcatgactaggggccaaggaataacgccgtccattcttcgcatgtgaagtttttcagatcttgatcttatcaagatttccttcctggcccgtaaagaaacaatacggagtggacttgcatttatccctttgtggatctttgtgcatctcacatcagaccatgtcgaattcatccgccaagctagttagttaaaccccgctgcaggttgatcccccttgtatctctcgagactctctcccggccacttgtcctgtagactttctactccttgttttcttttccttgacgtaacacaaaaattccgaagtgtctgactatagtcttttataaagcaatctacgtgacatcaagcgaaatccaaccacaatgcgatttctttgcttgcacggtgccggcacaaatggcgaagtaagcatttcagtagctttaacatagaagatactgaccagctacagatctttgaaatccaaacaggaggcatccgccaattactacagaaaagtggtcaccgcttccaattcatgaacggaaagataaacgcgaaagtccaagagggtgagctctattttctacacacgcctaagccatttactaaccccaactccaacccagaactcgaaggcatagtggatggccccttctataaccactacaccagaggtacctcaccaggctccaccgtccttgaagccttcgaccacaccaagcaattcatcgcagaagaaggcccattcgatgcggtgataggcttttcacaaggcgcggcactagcagctgcacttttaatccaccagagcaagacgtacccagatgagccgccgctattccgtgcagcggtgtttatttgcagtgcgatgccatgggagagttccggactggagcagatttcgccgcagccagatatctatccgattaccattccgacggcgaatatcgttggtaaagccgatgcgctgttccccgagggagtcaagttatttgagctttgtgagcccactaaggcggctttctatgatcatggttctaagcatatggttccgtttgatatgaagaatacggaggagatggttagagttatcgaggagactgtcgcgaaggctatcaggggttagctgagatgatgggaacttgtggatataggcaactattgactttctacaattccacctatgtttccaacctcgtaaagtttatagattgttattcttctctgccttgtctaaactactacagaatttagacaatttcaagaactaatcatgccaagcgcctaaagcaccttccctgtaagattggtgataattcgactttgatcaatggtaatgtgcgaagtggataaataccgggaaatgatatccaaaagtgactcttcaaatgagacgctaggttatgtactatcttgtgcatatcgcatatactccgtaatattataaggtatgatcttggagtgagcaaagttggaaatgattatttccgacctgtggttagttatgcgatgctgcatgtgtcatgactctggccctgagattggttgtctctcggtggaccatcgttggccgaacagcgccttaagtagggcttttggtaagtttgtgcaggttgaaagtggacctcccagcaaagcccgggaactagtaagaatgggtttactaaaattgcataactaactagttatttaactagctatctaaaaagtctgtctcggcggagtcagcggctaataagaaaaacagttctcactaaccaagggcgaagtgggtgctattacttcatttgatagccttgcagtggatgatgccctactggccttcgaggacactctttcgattataggaaaaaggtggggttgatgcatgagcctgaccttccaagagatatgctagtcaagctggccgacgctatcctccatagcgagttggctacgcgaaaatcgcttcaagctgtggttgttggattgggctgttctgatgaccatgtctgtctgtatcagcagctcacactgatctttggcttcctttttagtctttcacaatttgtttctcgggcaccaaggtcatcattattgataggcacgttttttaaagccttcgagggattgataaatcattattatcttttgcgttcgtgagaaagaagcacatcgtttcatgttcgatagatgcattgcattgactgatcgagacaaaggcctcagatggggtatatgaaatatagtgcaagagattatacaagtttccacagcatactaataataatggtagcatccatgggtgagattgtcatcagttctcattgtgggctttagtacggagtacatcgaaataaatatccgatcaatccgccttgtatacttcgtacttttccatatcggagattgcaatagatttgttttctgtttgtcgcaacttgaggcttgtttcatagattaatcatttacttccttgaaaggtaccccgtacatgtagcgccaagtcaacgagacctcggcggaaaatgttgccaaatgccagaaatgccagttgctactaataatagcacgtgggcgggttcctcgagcaacacacttctcacacttgtatgaacaggcagccgtataatccgtataataagaaaaaagctttggagacaaactatttctgcaccgaggaatatctacggaatacaaagtcatgtgttttacacatgtacttgtatgaagtataaaatacatcgactatcatgcttatagtaaactccattgtgcctgtttgtgatagataattttcttttgatcatcccaccacgatctaggctgattcaacgccactggcttcgcagccaataaatgccaatggtcctagacttgaaaatatttaacattcaatcccaaagaccaaaaccgggagcctgctttgtactgagaacgccacaacacgtgactctgggcaaagccgcctcagcggcaactcacaacttgtcagcttcactccagacaacaccgttaatctcttcccctctgtcacctgccgtcgcgctgtatcccaatctttatcagcatacaatagctattccccatacacaccgtctgcgttgattttagtcccccagactccccctttactgcgcctccccatcaaaacagcgcaacccctagtgctcctgcgagttcgtctagacactcccaatatccggcaatcaaaaatctgagcttctctcaaattcattcacgactctcataatggctgcctccgaacaaccttacgacccctatatcccatctggctccgctggagcccccgctgccaccgggcagaatggcaaccagcgaaccgccgctttgcaagcagtaagtcaatcctcgacaatctcttgactcctagcgacctcagccagtgagcaaacagacaaatatggtctggtggatagcgaatgcttgctttcttgttgagctatcaaaatgcgaaggctggggcggttgattttcgcaatggggctgacatggtatcatctatagcaaatcgatgatactgtcggtgtgatgcgcgaaaacatcaacaaagtttcccaacgtggtgagaacttggattctctccaggacaagaccgacaacctcgccgtctcggcccagggcttccgccgaggtgccaatcgcgttcgcaaagacatgtggtggaaggacatgaagatgcgcgtgtgcctagtcatctgtgtgatcgttctcctgattgtcattattgtgccgtccggtaagcgctccttggcattcccctacctgactctccagcgcgacactaacaccgtccacagtggttgccactaagcactaagcacttcaactgcgcgcgacttacgacttatctttggacatgggatcttgaattttactgggcttactgttgctgggcccgtgtggccttttgttttcttcacagccgctaatacctcctgctgtttttttctgggcgtgttttcgatgaccaaatcctctttgacttttccatgcaacgaagcgagatcatccgattttgggttgtgtcacctgcgacccggtcgacgggtgaagatgtaaatgatacttccatgacgccgtgttcaagtatgcttaccacacaaccattcgggtgctttctgactgcaatgaatctcccttatcgtgttttgaagcgaatttcgattgccgagtcttgctgtacctgaatagcatcatagctatacaatgtagaacgtcaatgtagatccacactgagcaaagacaacgtccagccttgtgcatacataccggttcatgagtgtgcacaagtgatgaaggaagaagggcgaccgagtccggcagagattggggtctctccgcttttggctagtatttacattccctgtttcgtagacaaggcggttgaccattacagggctgagggctagcagacttggaagtccacgtggcccaagacccgtctgacccgtgaagttccaattcgccaatgagaatatccttccaggaacccgttatgtatgctttacagagtatgtacatacatatgctcgagctctacttggcattaatctaacatgatctaaatgtttccaccgtggatctcctgctatacgagtgcagcagcgcaatcctggcccctcctgacgaatccttcgggaattcatcaaccgacagtaagaaaaaatcagataataatggagactcttggcacgagaacgagtgtccaccgattcctcagttagaccacttagagaagccctcgtatatatgtcggcaggaagcgcagagtgctaggtccagccagagtggagggaagtggatagcggtgacctaacggaacgagtgagaggcagggacaggatcagataactgagactaaacccaaggaggatgacgtttcacgatctccgagcagaggaagtgggctttttcggaggtcatactctctcttgaggaagtctaaggagattccaagttccagggttgatatccgagcccgtgaagaaactttttcttttatggagtttatttcgcccggttgcggcgtcacacaaatgttaatattgtacagagaaataaaagaagaccagggaaaataatcctctaggagttcttgagacaaaagaaataaaaatcaacaattcccatgtatacgaaacgtaaaagaatcccaattgcaaacaaagatggggagataaattgctcgctagagagggggtccaccgccttctccccgtcattgggtcaaagttatcgctccgaggcccggccgatgatctgaaaaatatctctcttgactcaactttctcacttaccaccttccttctacctacttatacatatttggggcctctcccacccagggccgaccgtgagaccattgaggctgccgcatgtgcgttgccaagatgatgtcccttcgctccgctgtgcggagagcttcgtgcaagcccctccgttctctctccgcaccgactgctcctctgcgagtctcagtaaagactgccacatccctgcgccagactcgcaattactctcgctcgacggatcctcacctgacctctacccgcagcaccgtcgtgcaactgttgagcaacattggctctaagcgcgaggtccagcagtacctgtcacacttcacctccgtgtcctctcagcagttcgccgtgatcaaggttggcggcgctattattactgagcacctccagaccctgtcatccgcgcttgcgttccttaaccatgtcggtctgtacccgatcgtcgtccacggtgccggcccccagcttaaccgcatgctggaggcggccggcgtggagcctcatttcgaggatggaatccgagtgactgacggcaagaccctggccctcgcccgcaagctcttcctggaggagaacatgaagctggttgaggagctcgagcgcatcggtatccgtgcccgtcccattaccgcgggcgttttttcggccgattacctcgacaagcctaagtacaatttggtcggtaagatcaacggtgttgacaaggcgcccattgagtcagccattgccgctggatgtctgcccatcctgacctccatggccgagacccccgacggtcaggtgctcaatgtcaatgctgatgtggctgccggcgaacttgcccgtgccttgcagcccctcaagatcgtctacctggctgagaagggcggtttgttcaacggtgataccggtgagaagatctccgctatcaaccttgacgaggagtacgaccacctgatgagtcagtggtgggtgcgccacggcactcgcctgaagatcaaggagatgaaggatctccttagcgatctacctcgctcatctagcgtcgctattatccaccctgccgatctccagaaggaactcttcactgactccggcgctggtaccctgatccgccgcggtaacaaggtccatgtgaagacctctctggccgactttggagatatgaaggctctaaaggaggtgctgattcgtgaccgtgagggcctcgatgcccgggccgttgttgaccgctacgtcgagggcatgaaggagaaagacttcaagatctactacgacgagcctatggaagctttggccgttgtgctgcccccgcaacccaactctcagatggctcacttggccactttcaccatcaccaagtctggttggttgactaacgttgcggacaacgtcttcgccagcatcaagaaagatttccccaagctggcatggactgtcaaggaggacgacgagaacctgacctggttcttcgataaggccgatggcagcttgagccatgatggccaggtcctgttctggtacggcgccgcgaacggcgaggaagttaagcagctagttcaggagttcaacgcgcacggtcgccaaatgttcggtgacattaaccttgaggcgcgccttcaccgcgctgctgaggctgccgccaacatcggcaagggcttcggcgctagcggtgcttctcttgagcagaaacgtgcgttctcaaccaccaccaacgccctgcgcatgacccgtgctaagcgtcccgccgttgccgtgaactctttccgcacttatgccactaccaaccccaaccctcctcttggagagaagaacatttccaacacccagcccgccaaggttgctctcattggtgcccgtggttacactggccaggccctgatcaacttgctcaatgctcaccctaacatggatcttcgtcatgtctcgtcacgcgagctggctggtaagaagctccagggctacgagaaacgcgagatcatctacgagaatctcagccccgaagatgtccgcaagatgtctgccaacggtgaaattgactgctgggtgatggctctgcccaatggtatttgcaagccttttgtcgatgccgttgacgaaggttccaagacgggcaacgtcattattgacctcagcgctgattaccgcttcgatcctaactggacgtacggtcttcccgagctgattgagcggtctaagattgcccgggccactcgcattgccaaccctggatgctacgccaccgctgctcagcttggaattgctcctcttgttccgttccttggcggccagcccaccaccttcggtgtctctggatactccggggcgggtaccaagcctagccccaagaacgacgtgcagttccttaccaacaacctcatcccctacagtctgactgaccacatccacgagcgtgagatcagttcacagctgggcaccagcattgcgttcattcctcacgtcgcggtgtggttccagggtatctccgtaagtgcctactgatagctcattgattctcaccattgctgacatataatatcaagcactctatcagcattcctctgaagcagaagatgacctcccgcgatatccgcaacctctaccaggatcgctacgctggtgagaagctcgtcaagatcgtgggcgaagctcctcttgtcaaagatattgccggccgccacggtgttgagatcggtggatttgccgtccactccagcggcgagcgcgtcgttgtctgcgctacgattgacaacctactgaagggtgccgctacccagtgcttgcgtaagttgctgaacccatccacttcatcagccatgatgctaacaaccctcatagaaaacatgaacttggctctaggctactccgagtacgagggtatccctcttgactaagctctcactcgaagccagtgacgagtagttatcagagtgtgtttgtgtgttgttcttgcatgtcttttgtctcataccccccgtgaatttatacatcgctctgggttggagatttctgggtgcttcctatctatttacagatcttccatagttgattttgtctacgcttatacttgtgtcaaaagagtgcggtttctgttggtctcagtccattttgctccctagaattctgctgcctcctttcgggttatcggtttttgtcccttgtgcttaactaacatatgggcccccaaaagagcctcgagaaaagtaaaatttctttcttctaatgttgtggttttgcccccaggagtgttctttatcccaggaccatatacgactcgatttgattcattgaacgattggaaacggggaagcagttcaatcgatgtaattagaaaacaatatatgttaatgggaacttttgacttgtactcatcagtgctatagttgtaagcgtggactttatgttgggatacataacgcatctgttcacgcctcaagggtcttgtgctcaagctgggacgcacactctctcttgatcaaccttccactttctccctcttccttcaagttctatcctcattttctgtactctttcatccgtgcttatcgagggtactttcatcgtacctttcactgtctttcgtccaaaactactccagaactgactgcacattactctggcccatgggcaaactcgaggccaccaacctgcggctgtgattcctcttcaacttcccctcccatcaaaaattatttcgcttgaaccgttaacctatccataacccgcatctcagaatccgagccgtgtggagaatcgagggcctgggtttcactcgagttcacttgagccacaaccatgttctacagccatgaaagtaagtcgaagaatccttgtggacgatctttatcgaaataaacactcacctgtttgtcgcactctagtcctcacctcgccagagcatggtgtcgcgacaatatggtaagaaaactcagggcttccacatatccacatccaggactaacaataccctcatcacaggctagtcgcaactctgggatcccggtcgatcgctagaagactgaacagaaaagccatccaggacgttgatgtccccaatgcatgccgagtaatcatcaatccagacgcatttatggctcttcgactgcaggggagcttgctgtaagatctgccgataagtgatgtctccagaggtatgctgacaacgtgcctgtgttaggtacggcgtctctcgagtgtacaatcaacagtgtgggtacacgctgctcgacacacaggcgatgcacgacaaaatggtttccaagttgaagatcatcgcgggcagtgggcttgatcccgccgccggacagaccaggtgattcccactgattcaattttcaagacattggccgaacactaacttcattccagggccagcaatctgatactaccttacgatccgtctttcctacccgagacagctcttccaggtcttgaaattgacttgtcctacttcactgtctccacggaagacagctcaagccaactgagtggtctctggaccaagtcgcccaataatagcctgtctggcacttcgcaactttcaagcctgcaccttgagctcccatcagatgatatcctgggagagggtactatcctagggattgatgagattaatggctctgcgcagaaacaagataccttcggtaacatggcagggttagggctgggaaatgaagagggcgttctccttcaacctgacttcgaatttgacgaggatggtaatatcatcgagctcggtgctagagagcagtctcctcgtggaaggaagtccaccgttcgctcaagggaaagtgaagaaccgatggaggaccaacaacaacggctctgggaagactcggtgagtaccaaacatccatgccgtaaccacaaatatgtctactgactctgttatagatgcagattgacgacaaggaggctagagtggccgagactaacgacatgatggagctcgacacgcagaccgcggttccaacaattctccagacaaatgaaggccaggatggggctgaagaaacaattgagatccaaacagcgaggacccgccgcgtcaggcgcccgaaggaaatcatctccgacgacagcacggcacttcgaaatatgacgctggcccaatggaacaatgaatacgttgcgaacatgatccaagcactaaagcaaaagcagcaaaacaagactccaaccatttcgaagaagaacgctgctttctgggttttcggtcaggggatcggctcggttggagtcggactgggaatggaccatgaactgcacccgctcaacttctactcaggcgaggatctgttcgaagccgttggtggataccctcagcgaaaacgaggaaagcgcagcgcagatgacgatgaaatatcagagggacgtcgagtacgcgcgagagacgaacaagcagagcatctcagccgtgagaatatcgaccgcctcaacatggaagttgaactcggccgtgatgccccttcgagtctatttgacgaccactcgtcccagatgccatggaacatcaccgcttctattcaaagctctcggcaaagacatcgattcggcagtgtcagcgagctgtcttctcaaggacgtaagcctcgaagccgtctcaccagtgccagtccgcttgccgggcgcagctatctcgtgggacaagaccaacttgatctggagctcctgggtgatttcggagacgacctagaccttacccggtatcttgaaggggagctcgcgacagaccgcgagaatatcacctcactctcccccagtaaacgttctgctgtcgaacgggctaagtcaactctcgatcgggaaagcttgaatttcatagagtttatgaagaccaagatgggtactgctaacgatggcaaagcaggaaatgcacaaagcccgaacagcaacgcgtctagtccggtcgcaaccagactcggcccgaccacattcgcgagtcttcttcctcctgggagtacaacgcgagctgtcgcgactcaggctttgatgaatgttctcacgctcgctacaaagggtgtgttacatgtccaccaagacgggtacatcgacgacagtaccgagtgggcagtccgctatcgctatggcgagattttcctacgactggagtgagcgtgaaacgtgcatactaggttttgcgatgcgaccacgaatgacgtcgaggaactcgtgtgcgaatggttcctatttcaatgagaatgaagagaaacggccatgacgattgatctatgaacgaacctattgacgcgatctgtgctggcgtattacatcaccacggaatgcgcagatggaataacatttttacagtgcgatgtgcgtaagagcgaaggcaataactgggtatgcgaggatatttattgcccatcacatttatactccccaatcttaccaggaacctgtatgttgtaactgaatatgtagttgacagtattgcgtatgggatacgcccacagattcagtaacagtaataatacccgatgttttgatcgcgaaccctggaaatggaagtatacgaaagtacgaaagtacgcaagtatacggggacgtatacgaagtataaagatcaataatcctcggctttgcttctgattgtatgagattcacatagaatttgtcttcaccaaatccaatcataataggctctgatccgagtgtgcctcgtttgccctgaattctccgactcggcggtaggcttacatcttacacttctgacatggaggtttagaatagttcattgcagattagctgtcgaatagggattattcaaggaattgctttttattaggcatctattcataagtatatactagtgttatttctagaatatcccgaccggtctcatccagccgatgtaagccggtaagtgatagataaagtgaatggaaagaggctaataagtgaaacatgcactcaatacacattctaatagacttgatagagtaattaatagacagtataactacaaatgtaccataacgacatagatgtataggtaatatacctccagtacaagtaccggtcgcacgtaccgtaagcagtgctccaaattacgcagggtgcgtaacccgcgtattctcccgtcttcgtctttccattttcttttcttctctctccctgacccctccaactttacaactcatacgcgcctttacccattcaaagttattctcgcgaccttctttgcttactatcgtggatactcttcctctcattactcccctaatcatgggtcgtaccgtcgaccaggaggtacacgcggcgtttgtcgagtttcgcgccaaggaagatgacaaggtgcgtgactgtgtatttcgtaatatttcacccacgacctgtccgtcactaacatacggaaacccgttttttagtgtctctccgttcagtgtatatactgccaacaaattcgagcaaagaacacttcgcgacagaaacaacatctccttgaatgtcccggtctgcgcggtcaccccaacgcgcctcagccttcccagcccgcccaggccgcccctaacggaatcggtccccccaatggctaccccggcactcccaatggcccaaccgcaacctcgacaggtccaactggtcctggtactatcccaactcccaatggcaccatcatgaccaatggtgtcaaccctcatgcgactccgttgcagaccccgttgggggccctccagaaccgcgccgcaatggcgaccccggttgcgcctaccggagctccgtctgcaccgccaagcgccgtgccctcgcgcccgactcccaagccaaagaccaagacagcaagctcgagcttgcccgcgcccccactagacgatgtgcacgcagctttcgttgaattccgcgcaaaggaagaagacaaggtatgacgaaggaactgggcgaccatagaccttggaacatacaagctaacagtgcggaatagtgcctgtccgttcaatgcatttactgccagcaagttcgcgcgaagaacactagtcgccagcgccagcatctgctcgaatgccctacctatctcagcgtgatgaaggactcgatccccgccaacaatctgctccacacattccccgagggcgatgtcgcccgatcacttcagattcccgcgccatcgctggagctggatttccgcatgagcatcaaaatgaaccccaaggtgtctgttggtcccagcgtgtggggccaacgagagtgggtttcgttcatcggcggccaatgggccggtcgatggggtaagggtgttgttctggtaagactgaatcccaacctccaatcattacttgtccggtgtctaaccttttaaaaacagcccggtggtcaagatacacagattgtgaccaaggattccactaccaaccttcgtgcgagttatatcctccagactgtcgatgagccacctgcatttatcatcgtgcgcacagaaggatggttgacaggcgccaaggatgttctcgagaaggtcatcgatgccaacatggcggatggggtcaatcccggcagctataagtaccgggtcaatttgtccatggagacgggcgatgaacgatacacattcttgaacactttgatgtggatcggcagcggttgccgcaggggtcaggaaggtaggcttcttcaatgctttcttttgcgattgtcccatactaactagtcatgcagtcatcttcgactcgttccgtgtcaactaggtcaatgcccttgtcaaccaatgatgtcctttccgttattcagcgatttcgtctttttttcaacttcaactttgtgatgggaaaacggtgtttctactttgccatttcttgacacacggcgcaacgtttctatgattcgatccttctcaccacgactttcttcttccgactctctttgtttgatttcgaaccaagggtatatccgccaccctggtttgcacatgccccgcaattaagctgatcttgagctctgccttgtctttgctcttcattccatgtgttttttgcggttcttcttctggtgtaattcttttatggctatctctatcaacatagtcagccttgtaaggtattgctagcttttttttgatctcggcttttcatgtcccatctccaacatccagatttcatatgcaatattccatgtagtcattctcaataggattgaatgttgttccggatctgattgatctctgtttcatgataatttcatgataccttacaaaaaggcaggtaactctagccctggacatcgtacgcttacatgaatggtgatatcactgttactatgcaatctctcaaagcaaagattcgactttagggagatgaagatatctgaatttggaatgtatcttgtttttggaataatatagaacgaaatatataacccgcttgtcatgtaccgcaagaccgtactcaaaccacggtatatacctgtacgtaccaggaacataacgaataccttttcagagaactttgctgtatatcgtattattatttagaatcgagcaattaatttgattttgtaattcatggaagcgtatataaatacaaggataggtattatacactatatcaatctctagcatactcatctccagtgaacccgaactggttgaaaaccaaatcatctgcccacgtaatagcaaacggattcctgaccaggtcagacagcggacttcctagcctcggtgaaagcgatatctgaattgcattgcgctcattggaaagcccttgagaaagactcatgaatttgagggagagtgggaatcgcacaaggggtgactagttagctgattccagtcagcggtagcttttatgggctgaaatcgccgatgtcggatgtcgcaaagagaggtatgccgtcgctgggtatagccgaatcgctcggatgtgcatatagagaaggaaacatatgcctattggtattgggtactttagttcctaatgttgacctcggtttgcttcacatagatccaagcgctaaaagttcctagcgtgccggtagctctctgttgagcgggtcggccgggaccggattggaggaggcataggattctggtcatggctgattgatcttatacgaaaaagatgagcttgttagtattattgaatattgttttcggggtaactctcgacacatggtatttaacaacgacaaaatgaaaaagagaaaataatatcatggacaacctagagtttccatgccaatgacctatcctactactagacacacgcctccccaatcccgagccctttcatctacggtttcaagcctgggttcagtgcctggaaatgcagcacaagactccggtcttcactaggaagtacagtgccccgaagaatcggaagattgagagaccagaagtggccaacagaataatcttgaaataccatgccgtgcgagttgtagacgtcgactatgtcagttagcgggtgtaaacagcagacgaaggaactcgagcttcacttaccgttagacaaagcctgtcgatgctgaggttgttaatacacagcgccagaagaccattactgaatgtccatagcaacaccagattcgttcggaatgctttgtatgaatcgtcgagggccaccccttcgttctcagttggttcttgccagggagtcaaggcccgcttcacagttgacgcgaattgttcatcaatgtcgacttgaggcttgtcaagttcctcgacaaaaggcgtttcatcatcctttttggtttgcgctgagggcagtttttcgggtgcatctgatccctttgtcccccatgaaacatcatgccaattgcaaaatgcatagaccatcagaacattgatcgaagaaggcattccaaggaaatatgcccaggaggaagtgagcatatgccaggggtcggcgtagagtatacttgcaatgaagtaaatcccgtatgttgataccaaggcaatcaaaacaagcccacccgttgagttgaaaaagcccgatatgagtgccgaaaacccatggctgaaatcaaaattgagattctcgggagtcattgcctgcgcaacgagatagaacgacaaaatgaggagatagagctggaccacagagaagtagacaaaggagagcgtgtacagaaactttgatctgtgattggatattagcggagcgaaagatagtaccctatccccaggccctaatacttacccctttggtcgatttccgagagctagaatgaattgaagcataagaaatgtcagataaccgatcttcaacagattattgacaatcggggtagcatcattcccaaaaggccaccctttgaatttgttggtcgcacttggtgtccccacaatatccaaaatgacggaactagtgagccagtaggatgctatactatgttagtgatctggtgtaggattgatttgaaccccaaagagtaccgtcaacttaccgagtgaaagccatgtcatgactaactggcagatattgtaaatcaattggatatgaagcagtagcaaccgaatgataccatgcccactcttatatatccgattgaaatgcatgactgaatataacgatgctgcaaaagagccattcagccatcgtcgccgttgacttaggaactctgctggtcgttctgggacgtctgtttcccctttcgatgctttcacgtatgtaagtagccactggttgccagccttagcaactaattcgaagcaaaggatacgatcctctgcaagaaacatattcttcttaaagatattcattccgtcgatccctttcttaccgagcttctgagctagtgtgtgatccccatgaaaatactgctcaagaggcctgcccataatagcgcgataccgataggcagagaaagcccccggaagtacgctgacgtagccaaaactgctctctaagggcttgtccaggatattggagattttgtattcaaaattttgagctgcaaccaagggattgaggagcttcttccatcggtggccaagaagcgcgtgaatttcaccgcaggccccaccaatatttttatcgttgtagaaagcctgccatagggctagcaaagacttaggcccgggttttgtgcccgcgtcaatcaagatgcatatctccggattcaaaatgcgcccaaatgcgttgaatagccaccgatgtgagttgatcttcttcgcattctttttcttaaggcaaaacatcatttgtaccgggggaagattcatagggtcgtctttgtatggacgcacaagctcttgcttcggcgtaaccgacaactgtgtggtatattcaaactaagaaccattagcatctaaacatttcccttactgaaatccacaagggttggaaggcggggaaacaaacaacatgagcgatcgtttctcttccgtccacatcttgcttcatcacgccatcttgaaaaacgccaatagtcgccaggacgtcaagtgtgtttttatcgcagggatccatgccatcgaagacaagacagacgacaatcttctgccatgcgggaccaccccgatcccaaaattctgtctttttcaatttcacgatgtctcggacattttgcattaccccatgcagggttcgggcggtcaggactttatcttcgttgtagtatgtgacggcaatgagaagttcagtgtgccgattatacatcgaagggcggagattgtaaccattgcgtagcgtaaattcatcaggatcacacgtcgcggcagtgtctaaagaaaatagaataagtcagcttatcatgatatgttcgagtcaactggaacattggtgggaatactcacatctcatttgtgtgaattcttcagaaagttccccctccgcatctcgatactctggctggatagcattgcgtataggactcggtaccggatagttgatactcaagaccgagccttgtgtcaacttgatccgccgtgttggatatcgacggatgctacttcccttgtgtcgtcccgactccttggaagaggacacagcggacccctggtgagaaaggttgtgtaatctgatctgatcaggaaggtcgagtgattccatcgaccctggcctagggctttgaacctcagcagatgaagagttatacggtcgacgagtgccttcgctccaagagattgggtctgtagagggactgagagacagggcagaagaatgggccggatgaagtagggagagggcgtgctcatttgggactctagtgttctggcaaggatgggaaatgtcagttcggcttgccgcatgttcggagatcaagcaatttccacttcatatacacttacctggggcgaataaccatcacttaggccgtcactctcattagtttgccgtacatagtgcgatgaataaggccgatcaaaataattcatcatgtaccaatatgaattcagtactgggggagtgtgtaagctgaaagttcgagatgcaatccctgaaattttttgatgccaagccggttcgaattgattaaggtatgacaggctgtagaaaaatgccgaggaatttgcaggggatatcaatcaagctgaaaataattgaagagccttcccctttccttcccaacatggaagaataacgagctagggcactctaccttggcccaagagaaattaagtataagaggctaatttaagcccgggaccccacatctctgctcgatgagttggccaataatatggcaggtcctcttttttagcgtgaggcttaaacacccttattatcctcaaccagccaatggacaaacccatattataggcactttagttacctgagtacatcatcttggtaaaatttcacttaattaaccgactagatattactcggattttgtgaaatcccacgaggcacaaaattccgattgcgccgagatctgggatcactttgaagtaagacacgcagtgaagtttcatgtattttaagagtgtttttaaaagggttagacccttctaaggataagtacgagagctggttccaaaataacacttcccctcccaaattttctctatgttgttcaaaatgagctcacacttggcctctcccgatcagcgatggaatcagagttaagactggacgagacacagccagacaaagtatcgggcgaagtaattgcacaccaggttaccggctgacttgccaacacattgtcctaaacttgtcggggacagcaacgtcgcggctgactcaaagcaaacgcacggaaactcataacgtatgtattgattgttgtcattaacacgtaaacttcagcttttccaaaagtctcaccgcctctttccttcagactatttgatgtatactagttcaaacagctctggtgtaactataggaagcggggataatattctccgattctctatcacagtcagcattaatcaaaatcgaaactatgtgactgaatattttcaatatttctcagattctacaggtgattgaatgtgttctcaaatggctgtctgaggctgattaaaaagggttgtattagccatgatcaagataaataagaagggctaaaatttctgcattcaccttggatcctctaacgagaattgcgagccttattttaagctcataacttctaacattgcagacttcgaagctcgaagtctcagggggcagccagtcattggaccatatggcatcccccaaactgaccgttgagtccgaaggagcatctttgagacctatcttagacgggaacgtttatctcttgatccaatgatctagggaaactcctatcaagttaagtctcatatcatcggaagaagatatgagccgtacttagggtacatgacgcatccgcagtctcccgtcgagtccctgtttgatctgcagggaaagcccattatctgagttgtgtttcccgagtttgaataatccatgtcatatataccacttacccactttttgatgcgttccaacagcagagcacaggccttaacaataaccgctgagaattacgtagtgggaaggggaaatgtaaagtacgatagggacgagcaggtagagtgtttatccatgttattctttgctaacctacgatgtttgggttcgtactgagaagcccgagtatcctacttcgtacctcgcacggcattcgaggtgttatctatccccctgcagaaatcctcgctctttcattgttttgtctcacaatatagagctttcagtgaagaaaaagcaagtccaaactatttatagacctaagtacccgacccttgtggactaaattaaaagattactcagtcaaattgtccgcgctatccaaatggtacggatggtagggtaatatcatagccacaaacgcagtcgtttagagatgctgtctcacaaagtcagaagaatagttctggcaagagtatcacaccttcgcaggatcacgaattcagtaacttgaaaaaagcaaatctgaactcagccatgagtagtacaacttgggccgattttcaataaggatcacacaatctaggttgatagccagcccctttctagtggctgtttgttagtccactggtttcattacttgcagatagacaagagaattctcaagacgccgatgaatacgaccctaaagaaatataaatattatcaccctgctgaccttgagttagactcctctagtaccatttcacatttgacattcccataatcgagacatagttcgtccaatttcaatatgcgtctcaccttcattgtatttatggccattatcggcgctgctttggctgcagacaaggcccctcctacggtaagttctaacaaatgaacgtcagataccattaaagcctctaaacattctttagattcagaacggatccccttgcaaggccgatggcagcgcaggaatctgtgccagtggcttctgtttggtaggtttcttgccttgctgaaaatgttgtgacatcaaatattaatatgtcatacagcaacttgctcacgacaatgagggagtatgcaagtagactacggatctcactattggttttaattgattgacgatgcggcatttccgctcaaaggaaagccttcaggggatacagtatggactactcatatgggtgggttgcttaagtagtcgatgtttttagctgaatatgattgactgctctcggatttggagaaagaatagcttccctcagctcaaggctccagttaatcgcggctctcaactcagaacccgtacaaggctgtgaaacagaatggtatttggttcacctgaatcgaccaaagtcactggagggccagctgtgacgttctacggataggttgcataataaataaaaaaggaagttgtgacatttgcacctcatatgggctctgttttcggatgtaattcaatatcaaatagtcgctagtacaaatgaacagttgccaatatataaattttgaatcagagttagaaacctaaggttcgttgttagcaatttgattgtttctgaaattggtgcacgagaacctacccttttccgtgttaccatcacccatgctcttgctgctgctgcttccgctctggatagcgcccaatattccatcaatgtaaggcgcgccactccacttctggtgggtgagaacgtcgacaccgagctccttttcgcgggcctggacaagacggacataagccaacataccctcatccttgaatgcacgggaaagttcggtcgtgatggtggcattactatgcagaccagccaaggaaatgagctgcaggacaaatctgagaaaggttagtggatcgaagcgaaatagttgcaatgttgagcttacccttgcttggcaatatcccagacaaaggatttgagggaggcctcatcaaatccttgccccatccagttaaatgaagggctgaggttgtacacaagcttcttgcctgggtacgccgcccgcacttcgccggctagctttccggctttctcaacatctgggtcaccggtttcgacccagagaaggtctgcatacggagcaaactccttcgcgcgcttggtcgcggcagggaaccctgcggcgtagtggtagaatccctcacgagtgcgcgggctatcacatgaccacacaacaggccttttggtgtaatcgttcgccagggcacggcgacgggagaaggaaagatcggggttcttcttaacaaaggccttgtacgcatcgcgagatgactggggggcgccctccgactcaagatgagcatcgacagctacatattattagtgaatgggatcgcttgacacagaatcaatagacataccttcgtcgaatgtaacaagcttatggctcttgacccagccaagttcgaatgcgtcgatttctttgggtgggacgccctctcgttccatagcttggagggtctcggccagaggttccacctcctccgtaataccaaggatgaattcatgatcacgcacatcgatggcgctgctgatgagtcggccgctctcggaatctgttcgagcaatgaccaggttctcacatcccatcatatcccactggaaccgagctgcgaccagtcggttgatgtgttcacccactgggacgagcactttgcctgcaagatggccgcacttctttccgccgtgcaattggtcctcaaagtgaacggctgcggcgccattctctgcaaatagcttggcgagtttgagaacagccgataagccaccatggctgcaccgagatagttagtaatacttcgtgcgttcaatcccaagtattaacgtacccggtgtcaccatccgcaacgattggccggaaataatcagtgtaaggtgtggcctttcgctcttctggggtcatctttcgcctcgcgtcccactgttttcggtcgtgcatggactgagccttgaacagacgctggacctggttggggacggtattatagggataatcgccgaaatccggtgatacttcattggtacttgtcaaaagtgaagagcaagcccagcctgagatgtatagaacctcttggttgggggcttgctgcgtcatttggacggggtcaatagctcccacttgtgtacggaaacgagatcagatttgccacaattggagctcggccggtcaaggactcactggtatgaacgggctgaccggcagctgctcgttcgttgagaagattaaacagcttccgcgccatcaaagaactgggatatgtttgttgcaaggagccgcgtttgctcacaacatctgccgccgtgtaagggcgcttgatgccttcataacgaggcgaattccaccatgattccacatcacgaagctgttggtcgtaaagggcatcttccgctgcacctgctttttcttgtgtggacagcagctggtattcgtctgtggggaggacggtggatacggggggctgcacaggcgtcatccgagtataaccgcttgtgaaaggtcgcaatgaacgcgcagaaatagtagacacaacaggaacacgtcgaggcagacgtcttaccgaacggaacatgactgacagtaataatggaagaacaaaataatggttgaattgaaacagggacgaaccgaaagaaaaggaactaagaagcaaataagggctcctctttgacctcgggccgtgaacatctggggtttccccgccacttgactccgaaggtccgaaattcgctacatgactaagcgtacggtcaatggatgttaactaccgggacctcgggcctcgaccaacaacattggagactacgacactgcttcgtacatagtattcgtttatgtgcagtctttttgccttgctcgtttttcagtgccaacagtctttttacagctgaatatcccatgattgtcggtcagcggtcaggacagtatgctctcaaaatgtacgacctcattggaatggtccttattgtcatatatgacgactggcacctttttaggttgacattgtctatgagtaaaggatcttctcatcgagggctctgaggctcccaagtctgtgtggtaacgaatgttggaattcttgtgttttacgagccgtggtaaccttgcaagtgcctcttggttaggtatggcctctagttttaccacctgacttcgaggcattcttactgcattcgcctgtagtctgaccttaacatctatcaatatcaactggcatcactttcactttggcctcacattgtcttcacttcaatccttcttttatgtaggcgtgttggacctatcattcaaaagttgattatgaatactacaatatactactaattgcagccaggatgtcgaacaattctaaaaatgtcaattttatactcacaataatcaaatcagaagattcagatcacaaggttagctatgggatatagcaggcactggcgggtgaaatgattgaacaatgccattcaaaggctctattgaagcacatggctatccaagtctattgttcaacaaccgatctattgagcggattccttggggcataactcaatacacattatgctcgatggagacattcagcttggagaaaaaatagttgagctttattcatgtcgactatcaatgggctcagtactgcttagccgtatataaacctccaaaatcctctcatctagtcctttcttttccctcttcaaatctcaccaatcttctgcctcgctctcccttcttttcttcttttcttttttcttttttcttttttgtttttttttttttctttttttcgaaaatggtgctggacaccatgcctccgttctcgaagagcggcctccagggannnnnnnnnnnnnnnnnnnnnnnnnnnnnnnnnnnnnnnnnnnnnnnnnnnnnnnnnnnnnnnnnnnnnnnnnnnnnnnnnnnnnnnnnnnnnnnnnnnnnnnnnnnnnnnnnnnnnnnnnnnnnnnnnnnnnnnnnnnnnnnnnnnnnnnnnnnnnnnnnnnnnnnnnnnnnnnnnnnnnnnnnnnnnnnnnnnnnnnnnnnnnnnnnnnnnnnnnnnnnnnnnnnnnnnnnnnnnnnnnnnnnnnnnnnnnnnnnnnnnnnnnnnnnnnnnnnnnnnnnnnnnnnnnnnnnnnnnnnnnnnnnnnnnnnnnnnnnnnnnnnnnnnnnnnnnnnnnnnnnnnnnnnnnnnnnnnnnnnnnnnnnnnnnnnnnnnnnnnnnnnnnnnnnnnnnnnnnnnnnnnnnnnnnnnnnnnnnnnnnnnnnnnnnnnnnnnnnnnnnnnnnnnnnnnnnnnnnnnnnnnnnnnnnnnnnnnnnnnnnnnnnnnnnnnnnnnnnnnnnnnnnnnnnnnnnnnnnnnnnnnnnnnnnnnnnnnnnnnnnnnnnnnnnnnnnnnnnnnnnnnnnnnnnnnnnnnnnnnnnnnnnnnnnnnnnnnnnnnnnnnnnnnnnnnnnnnnnnnnnnnnnnnnnnnnnnnnnnnnnnnnnnnnnnnnnnnnnnnnnnnnnnnnnnnnnnnnnnnnnnnnnnnnnnnnnnnnnnnnnnnnnnnnnnnnnnnnnnnnnnnnncccctccccccccgccggccagctgcagttcgcagctggcaacgaaaatgacatccttgaccgaatgggggatgtcgagtatcccccttcgcctgttcgggaggatctggagggtgtgctgcccatggagggcgttgattttgtgccggtctccggtgtctacattgacaccatggtccgggatgtctccccggacatggatgtttgcgcagagtctggggccgtgtctgccttcgccccccctgctctgactgtgccttcctccgtccctccggtggtgccctccctccccgtggccgcccccgccaccaacaagtaccggcaacggtactagttgcgtttgagaagactgtgtgtgtgtctgtgccctgattttctggggcgttagctaccgtttgttttgtatatatatattctcttaatgaaagatatttctcttcacttttgttttctctacaggatattttttgtcgtagccgataatatccgtagtcctaatggtgttggagaaatgatccccgcacgatgttgttaggtattgtttatagtgattgatatccacatccacatagatatatccacagatacccgtggactcgggttggaaggacacacgagctccttcaactcggcacagcgtagaatccaatcagacatccgcgatggccgagccggttgagattgaaatggaaaacgcatctgggattctccaagatcggcgcccccgcatggcttatcatctcctctccgtgggattccctatcttccacttaccattcgctgtcagcgcctcttatctttctgtcttcatctccctagttatttgtgtatatctcgttttcttccgtttgaatgggttcaacatcgacttggtatggaaagcattaaattcccaccgattttagacccgcccgacaacccggcatcagcgcggggaaatcttgggccacaaaagccaaaacagacaaagagtcggaatggtaagtaagaatacagtgagcctacgtcttcctgttaacgaggcaagaacaacgaagaatgttacttcatcacattgtttacaagattgactcgagtctccacttttataggttgcatcacctgcaaggcaaagcggttgaagtgcgacgaagtcaagccatcttgtcaccagtgcgaaagacgaaaggtccaatgtggaggatacaagaaagacttcaaatggcgaccgttcgaagagatcaacatggcctctgggcggcctaccgtacccaaagccaaaaagggtaagtcacgggtcgtgtgagttagcctggtatactcacgaatccttttagcgaactcttcatcccatcaagcttcctctgccgccaatattggccagtcctttccgactcctccgacgactgaacaatcggcatcgccgattcgcatacagtcccacaaatttggtggctctcgttcgcctccaggctctcctttgcatagctcgccccttagtataaatagctttctttccacggaagcccgttctcttgaagatctacccgtcacacgggaagatgcttccatggtagagtgcaatgaacctccccttgatatcaatgtttcattgtccgccgactctccccctttcaattttctctccttcttggatccttttcaggattctctgtcgcttgcaaaccccttgggctctgatgtcgataccgatactgctagacatttgccgttggttccagacaagccagataccgatgcatctaggctgagcttctctcagctattggaggatgaaaacgatgacattgaggagatcatccggaaatcggatccagcattgggaccttggaatttcgccctaaccgagggagactctttccatattgaccccccaagcatgtcagacaacccatctctacccccggaaagtccggaaatgctcgtgatgcggtttgataaactcacatgtgggattttatctatcaaagatggttcattagagaatccgtggcgaacactcatttggccgttagcaaaagacgcgcctgcacttcgccatgctatctttgctctgacagcgttccattcggtaaagcaaagcccgcaccttcggatccaaggagccaaacatatgcgccagagcataaatggtctagtcggacaaattcagaatatgagggcggatactgcgctggcgactagtttggctttggcatttgccgatacctgggaccaaaacacccgcacatgtattcaacatctgcgaggcgcaaaaacattgatgtgtcaggtgatcgcggccgggatgcaacgaggtgttagtgatgaggagctggatcgcatccggttcctctataacacatggtcctatatggatgtgatcgcacgactgacttctttggatgaatgtggtcctcaaaactgggattcttcggttttcgagcttccaagtgatacagtccatgatattgatccgttgatgggctgtgcaacgactctataccctcttataagccgggttgcgaaactgatccagcatgtgcggaagagcacgtcgaacacggtgtcggttgtggcccaagctatggaactcaaagctctcgtcgagcaatgggagccaccgcaatggtttgagccaccagatgaccccaactccgaggttcagcatagtattcaagttgcacatgcctatcgctgggcgacgttgctatacctacatcaggctgttccagagataccctccgagccggccgatgaattagcaaagagggtcctgatcttgcttgccactgttccctacacttccaggactactatcatacaaatgttccctctactagcagctgggtctgaggttgacactgaagatgaccgaaaatgggtcttggatcgatggaccacaattcagtctcgattgatgctaggtggtgttgatcgctgcttggaggtgttgaaggaagtctgggaacgtcgcgacgcaatgaatgctagaagagcgcgtgaaatggccagttcgcgacgtggcgagtctttctcatctggagatagggagaaaatgagctcgtcattgccagccgatttccgcaaatacagtctcaatggttcccacaaggggccaactggaaggccaggacaacctacatcgaggtctgcgcgacggggttccgcactcgccccgcttgaaaacattgaatttgaaagaactgtgcgtggcagattgcattgggtgaatgttatggctgaatggggatgggaaggtgggtttgacaactttcaaactatttcctccaaaagctaactctgcaactcatagttttccttggctagcctaccagcaatgaatggcccaaaccttggttgaaattgggtgccatgcgaaaagaatatactgttctttgcattctagcctgctgcactaatatgacagctaacaaagcaagcaagtctgagttcttgtttcctgatttttgttatcatgtcctcattcctgtgtctctactttatttgtcctaaggttgaaattgtacctgacttggtgttgccttgaaccagcgcggcgtctagggagtctgttgttctcttgttgatgagttacgacaacgatgttttttttcgattgagacttgttttctacaactgtggtcgtcgctctgacaacgaattatggttgatctaggaactaatatgtccaacatgatggtggtttatttgacttccacgctttcattcagcttttcaatacgcgatacccattccggaagcccctaagcgactacccagtttttggcctattgatataattccccaatgctgattctctatcgaattttcagtaatacggaaaccatgatcagccctatcagagtcaggctcatcatcttctttgccatatgcacccgatacatcagctcgcttggccattattaccgccctataccggaatacctacctaccaacactgatcatccgacgaaagcagtaacccacatttgccttcgtaggcgcgacccagcaaggcctggtctgatattgtcccaactgcgaaaatgtaaattccaggaagctatattttcagagagactattctctgattcttacaacaatctacacgatacccaagtctctggcttcccttacgcgctgaggaactatgttcttagccagattcttgggtggccctgatacagtacgtcctggtcccgatcaaattatgaagttctgggagttcacaatctatcaggatttgctcattacatcgtgacatctttagagttccttaaatcaaattgaaaggaacgacgatcaatatccagatgcatttggttgttgacgagtgcccctaggcctagaggcgattattccccaggagataccgctcaccaattgctgatttgtaagttgagagttttagaatttcacatccatctaatttgcaataggtgcgtgaaatccggatcccctcaataagggaatacaaactgctcagcttttgcgccaagaataggtacgaaatcttcaccctcacaaatcttcatggccttttgataagcaggccgatcaccaacacgcttgagataagctagaatgttcttatgcttctccccatcaaactcaatcggacaaaatcctctcatggtagtgagagtacagattgccatgatatccgcggcggtgacgtcattcccaacgaggtaggatccggtttcgccgagtctcgcctcaaccattgagagcgcacgctctagtttcgcattgcccatcttgacgtgcactgattccgggtcgctggtcaagcgccgggttatcaggacacggaataaggttggctgtagggaggcattcgcccagtggtaccactccaggaaatggatgtattcgtcgccgtctttcggtgtgcgcgcgagacggccctctccgtaggcggcgataatgtaatcaatgatagcgccagattcagcgagcacgaccttgttttttgtgaagggagagctgtcgtcttcgatcaccggcgcagtgccggcaggatgcaggtctttgattgattgcggggagaatatagggtcgcgcttgtggaaaacgaagtcataatcgatgccaagttcttcggcaagccagacgatgcgctctgattgcgagcggccaaggtggtggattgtcaatggcatcttggtttgggattgagaaatgatgaaggggtgttgggctgttggcgatgtgggatgggaattgtgtcgagaaaccaagtagtgatactctgtaggatcgtcggcatcgtgataggggccgtctccgcttgaccttcaccgagattcgtcaaattcgtacccctagatctcgacttggacagctccattacttgagttatgcggcaatcggatttcgtcaactcgcggtttacatatatgatcttagtgaaatggcaatgaggttaactatgagtgtctagacccactcagccattaaccaatacatgttgatatttaagcgcttcgtctgtctaaatatgcataagacttaaagcgaatacggaaactagcggagaaaaagtaccattaaagctgattctctgaagatgcgtcaaagcgggggatgcatgaagtacaggggtagcgttctcgttttgccgcgtccacatcacctctgtggtttgatcctgtatctacccacttacctgaatagctaccctcgaaaataatcacccgaagcagcattgcacagatcactcgtgtccgtcgatttgacatgatcaacccccaagacagattttggtccgacgcccaagcctactgcggcagggtcgaagaccctnnnnnnnnnnnnnnnnnnnnnnnnnnnnnnnnnnnnnnnnnnnnnnnnnnnnnnnnnnnnnnnnnnnnnnnnnnnnnnnnnnnnnnnnnnnnnnnnnnnnnnnnnnnnnnnnnnnnnnnnnnnnnnnnnnnnnnnnnnnnnnnnnnnnnnnnnnnnnnnnnnnnnnnnnnnnnnnnnnnnnnnnnnnnnnnnnnnnnnnnnnnnnnnnnnnnnnnnnnnnnnnnnnnnnnnnnnnnnnnnnnnnnnnnnnnnagggtcgaagaccctgccaccaaaacttattgcaatgtctgggattgggaccaactacggatgatcaaggtcaaaggcaccgccaagctgtttccgcccgatgggaatattgagccctcaattttggcaccattagcggattatctatcgccggaagttcgcgcaatcacagtcgacgatgatgggctactcactgaggtatcgacggatccaggggaggacgacaccatgtttattgcttatcctcgcctctcactctgtggatcgcttgcaggttgccgtacaattcagtactctaaactctgagagctcgatcggcttgggccatttgttggtctctcattgtacgaagacgagtcagggactcaaaaggtcgctttcaagtttgacgtcttatataaggctctatgactacaaatggcctgggatgaagttaatattctcaaaagtctaccaccacatcctaatatggtaccatttgatcgcgttgtcctcgatgaatctcgggtgattagtttcacaacaaagtacatcccaggtggaactctcgccaatccaaagatcccttttcgatttgagtggctacaacagcttactcaactggtggatttcctcaaccttgaatatggaatcatgcatcaagatattgcaccccggaatctacttgtcgacctttatacacataagatccttcttttcgatttcgattgggctgcatgtggagagaaaaacctacaagacggtcgtgatgacgttagtagcgttgtgctcacactctacgagcttatcacgaatgatacgtccttctcggatatcctccactgggaacgaaatatggacatagtgtcaaatactcgatattggaaagcagtgtgtggagaattgttatgtaaaattgcttgaaattgttatagtacacctatcccctgcacagtcgaccaatattttcccatttctcaagttcgactatcctctgtgtgtccgtattccttttatgccaagcattaaaagacactgatgggaagggctaaccgcatgaagtaaaagaatccctactcaactacacaatcttatcactggaggtaggctcacctaggcataactagtagtagtagacgatgagacatcaataccgtcgaaactcgggaattttctcttgattgataacggcctcccctaccattctcagatctttatctcaagcttgtacttcccctcatcactagcaagcccctcaacctctccgtgattttcccaacccattctccgttgggctgcctagtcaggatatcagatccgactatcgctattcgtctggattgagttaccctaagtttgggggagttttctttctagatgacatcccctcatttcgtacatggcagagcgcggcaacatcagtataaagcagaggtaatcctcgagaatggattggaatatcgatttatttctatactagattcctcatagtcagactgattcctcaaaccatggcagttccatttacctaccacgctaaggcgcaatccaccttcaagccgccacttattgccaatgacaacgccttcttgggtgatgtgcagtcaaggtatggcgatacttgtatagataatgtttcaagtaagcaattttgttgacatactacagcgagaaggaaaacccagacaagcccatgtcatgcggcttttaccgactggaaaagggtacccccctcgtctacacctacacctacgacgaaatgaagattatcgtcgagggcaaatttgagattgccgacgagacgggccagaaggttacggcgactccgggcgatgtgttttatttccccaagggggcgacaatcacctttacaacggatgactatggactggcgttctatgtgggtacccagctgaaatccgaatcatattccaacggacccaactaacgaaaccagactggccaaaggaagcagggcgctgcttgaggatataaggattaataagattaataagaattttaaactttttattttttaatttctcattttagaagtttccggttccgtggttgggcttgccaattatcggggtccccgtgcctccaatccatggaacactcggctgtgttgggctagttatttcccaatccggtagtttgcttatatatcccttgcaatagcttcatgattccggtggctgcacccgactaaggcctaccatagactacctacatgtacatatacatatgtatcgcccggacaattattgcttattcccccgaacacggggatgtgcgacattcgctagtctggattatgcaaaagtcaaaacccaaagtgcccacttcagtggcggtttcatgttgggaccccatagagtcaatctcacttgagaggagccgtcaaagcacaagtagcgattggaagtggagatgattttcagctcgcttcgataaactcatccactcggctggggtttagggggggtttaggcgggtttttcatcagtgtgcatgacgtggggggagttgctacagcaactccgtgaggaagggggggatagagtcgattgtagaattgagaatcaagatcttctgagatcttggtggagagggatcgacttggaaataacaaacataaaccttccaatatttccgagggacaaaggcattttcctcctttccttttctcttcccctaaccatcttcgtgactttgcctttgttctggcgtgttagtgcccattagttccggccttatcacaggggtcatcaccaacccctctatcgcttcgacatcaacaccatggctattattccagacgaccatcttggtctccgactccctaatccaccacccttgttgcatactcgtgggcaattcgatcgccccgctactcctgccgatggctttaccagtccaccacagactccccagggtagccccagcaagtcaaggttgcctccgggcgcactcgacctacccaatgtcttcgacaaggcgatgaagttgaatcccaccaccccctccaaatcgacatacaaccactacaatcatccaatgttctctgctggcaagagtggcgaggacttcagcgagagcgttatccaccaaaccccttcgagcccaacgcgtagagccaacaaggagaacacaccccccaacccaacacgtctaaaggacctgggatcgaccccaactgctgcagctctttcgcgccaagaaccataccaaccacgcgatgatacgaccagacgccaggtgcagatgcgcggcctgacccccgaggaaatggagaagctagcacagcccaaagtgaagcgcctcgtcaatgtgacccaactctgtaagtgcggcccgacctgataattttaagacagattgactgattcgtgcatgacagacttccttgaccattacttcgatctccttagctacgtccacaatcgccaaacccgccacacacaattcaaagccgcttaccccgaaccccctgctacccctgacgaagagtacgaacccgccctcctaaaatacctcggccgtgagcgcgcacatctgcggaagcgtcgcacacgtctccgccagggcgacttccagattctgactcaggttggccagggtggatatggacaggtgtatctggcacaaaagaaggatacgcgcgaagtgtgcgcgttgaaagtcatgagcaagaagctgcttttcaagctggatgagattcgtcacatcctaaccgaacgcgatattctcactgcggccaagagcgagtggctagtcaagctactctatgccttccaggatgatacgcaaatctacttggccatggagtatgttcctggtggagacttccgcacgctgctgaataacactggcgttcttcataatcgacacgcccgtttctacattgctgaaatgttcagctgcattgatgcgctccatgtgctaggatacattcaccgtgatttgaaacctgaaaatttcctgatcgactctaccggccatgtcaagttgaccgatttcggtctggcagctggtatgctgagcccgggcaaaatcgagtcaatgcgtgtgaagcttgaggaagtcgggaacacccccgttcccttcggtcgacccatggaacaacgtacaatggccgaacgacgacaaggataccagtctctgcgccagcgggaagtcaactacgccaagtcgattgtcggatcgccggattacatggcgccggaagttctcaagggcgatcaatacgatttcactgtggactactggagcttgggatgtatgctgtttgaggcattggcaggctacccgcctttcgcaggcgcgacagtcgaggagacatggcagaacctaaagcgctggcagaaggtattgcggaagcccgtctacgaggacccaaactacttcctgtcacggcggacgtgggatctcatcacgaagctagttgctgggaaggagcagcgcttcaagaatatcaaggagattcacgcgcatgactatttcgccgaggtcgacttcgagggtctgcgtgagcaacgagctccattcgtgcccgaacttgattcggagactgatgctgggtactttgatgatttcagcaatgaggcggatatggccaagtacaaggaggtccatgataagcagcgggcgctggaggatatggccgatcgcgatgataagatgagcaagggcttgtttgtcgggtttactttccggtatgttatgctcaaatccatgtcgttctcttactgaccactatagtcatcgcaaacctgccgtcgacagcaacggccgcagcagctcgccgcggaagcctatcgcgacggatggcacattcggcacaatgttctaggttcctggacaaaatgcagacttcacattcatattcggtcaatccttttctcttcttgcgttccactggcgcgtgcgggactccgagctggatcttggtttccttgtgccagatgtcccagtattgagtttaatggctcatattttctcttctttttgttttaacttcagcctcattttcgacttgcaacctgcaacgtgacacttcttctcgactcgttctgattttatggtgcgcgtggagttgtggaattcgattcttgtatgatacagccatagatcgaaaatggcgcagttcctgccttctgctagtaatggtttcattgtatggaatatggaatatgagattgatctcgatcgcgatcctgtgccgagcagactatatgtagcgcatatatcttaccgcagtacggagtaaagtatcgactcttttagtttacaggaagctggcgcaccatgcgtaggatctcggacttgtcgtctccaatgacagcacgaccattgacccagtcaacggtctatagagtatagtattagcacaacatatccagaaagatctccgatgtaacaatgggagtaaggaaaaggtcgaacatacaataggcctcacgaaattctcattatcctccttgaacttcttcaatgcgtcctccgcatcgcgggcgcccttcaccagctccgcaacaccatacgtcaccttctcgccgggattgccaacaccgctgacgggcgagatgtagtcgaggatgctgcgaagctggtctgttgtcgggggcgaggtggtaacctccagctcgaactcgccgcgctgttgctttgagtggttggtgtggtcgctagcctggtcttctgtggcggtttcgccagcggttgcggaagcttgtttcaggatgttgagggttctagtcgatgcttggatggagggggagtggaagagggtgatggggtcgagggttttgctctgtttgtgagttagatggtggtttggcagctaagggggggggtgaattggtgggtatggaggttcatataggcagacttacgaagcggaacatcttgacggtttgggtatttgcaatttggatgtgttttggtgatagaggtaggtagaatggagggaggtggaagaagtggagttggcttaagctgcagttcctggatgatgtcatgtgctggctcgggtcgtctcgggctaagctgcgctggtccgaacgcgtcaacttgatcttctctttctagtgtatattgtatgctacgaatactacgttgagaatttgagaaatgccatggggtatacagaatcattttctatgatcaggcttctaccgcctaacttggagcgatggcgtccctatgtcctatcaactctcaactccccattttgagaagggttttgaacatctctcaacatctaggactttatctaggcgacatagcctcttactgctcattgactgtccccatgcagtcgattggcctttttgtagtaggactgagcgatgtatccaatgcggttaggaacagaggctgttggggagggcgccaagtttcggggttgcgtggtattgtacctcactcgcctccagcgagtatcagattgtcacctttagtcattcctcttgttatgcctgcatatactcattagtgacacaccaaagtgccaatatgcaagaatatggacatacccaggaaatcataaaccaaagttctcaacatgcaagtagataccctgcgcgccagttcctttgtgcacagctcgttcatcgctcagagaaaccacgctgcggcggacatcgtctgctagaccacgaggtccgcacacaaccacggcactttctccttcggctttctcgaggaccttgcggatgatgattcgtggcatgggacgaccggagataatgttggaataaataatttctttgcttgtgacttcttcaggccgaagagacttcacatccagagcagccttctcagactgaacaggtgctgggccagagcaggtacaggcacaggcagtattgatatcctcgtcttcgatttgcgcagtgcaacagcaacctccaccagggagacacccgctacctgtggcaacgggagccgaggtcgatgtcgactcggcagagagagaattaatcgagacattgtccttctcggatatattcttgccttcatcctgggcaaaggtctccagcgtaggcggagacactgtctgtgatggtagtgagacagatataggcggatctagcttttcatcgcatgtaatataaatgctaatttcaatttccatttggaaatttgaacgtgtgcgtcgacactcactcacgtctgccagcaaagattgcagttcggaatcaaagtaagtcagctgagaacgtgatttgattacccagacaaagcgtaaccgcttggtagctgttaaacgagcaatacgggcaggcatctgctccttgctgccgttgctctccagcttccatgctgagacaatatcccgcagaagaggcaccgtgaatgtcgcacccatgccacccgccagcagtacaacactgtcgaactgccgcaagggccggatgcttccatatggcccttcgataaaaactgtcgaactggacattcccgccacttgtctattccccaatagactatcgctctttgaggcgtaccggaagaaacgtctagttcccccattctcggcacgaataaagaacttcatcctattatcttctggaatggatgcaatggtgaatgggtgacattgcaatggagcgacggagtggcaagtgaggaagacatgctgaccgggttgccacccgataccggggttttcgatagtaacacaagtgacatttccaggtagtggagtgaatgtagccgagtgttcccaaagagcattggccttattctttcggtggaaaatggccaagttcgcatatgcaccccaagtgtagcgagcaagccgatcgaagaccaaaagcccaattgggatccatacccagaccttgacttcattaggcgcatgcatccataccgcaacaataaagccaacaaaggtgattagatgctggatgacaaagaactcataactgagccgacggattggagcgaaggaagtgatcacaataaaggtcagaataacccaagcggcaaacccacgcttcgtcaacggatcgttatagagctggtacgtgatataattccagcgaccccaatcacggaaccagaatcccatatggatggtggtagtcaaccacagcgtccgggcaacccagcgatggtaccagttcaaactgacgtagctcattcctgccaagaacccaataatgttctgtctgcctgccagcagaaagatcagcggcaactggcaaatggcgatgaaaccagtgcggtagccaacatcttcccatttccatacgtccgtagtgtccagcttgtagaaacacaggaccatgactaccaccaggttggctaacatgatgagaacggggccaagtggcgggaaatggagggtcaatcctccgagtcgaaacggccgtggagtcgcatagctgacttcgcggactgttgctgtgacggtggcgtagagattgaagaacagagattttggtttggcgggcgtgagtgaagaatctcgcaagctgattattgtcagtcaagatcaccggatgtcaaggcacaacataccgatggctagcaataacgcgatccagcacgttcacaagggttgctgccccgattgcacttcccacgacagcccagtacatcttctgcagggtgaacagactgggaatgccatcgcccatggacattgagcccgcaggcatgtcacccattgccatggacatcttgtgctggatgtgtagaagaaggcatgagatggaagcccactaagcatcacccaggtgtcgaggtcaccaatgtcaccaataacagagcagattaccaatattatgctcatccatgctcacctcccgggtttgggtcgaggtggggtccgccatgtggacacccgtggcaccgttgggcccaatgcggcaatgtgtaacttcctgtttcgaaggttatttctcttcttcatcttctgttgattctcatactctctctccttcctcaatcatagaatcaatcagaagacatggatatgaccagctcgacctcacacagtatgagctcctcgacgagctctatgagcatgactatggtcttcaaaaattcgcacgacacgccgcttttctccaatgcatggactcctgcatcctccggtggctttgcaggcacatgtattttcttgattattctcgctatcatcgaccgatgcctcatcgctttcaaagtaaccacggagcgccactggctcgccgcacatctcaaccgacgatatgtcactgttgctggcaaaagcaccgaagctgccaacattgactccgacccggatgcgaaacttgcatcgcttatcaccgcgcagggcgttgaagagtcagtcaaagttgtgcacaacatcactcatgggccaattccctggcggttcagcgtcgatctaccgcgagcagtcctgttcctaggcattgtgggcgtatcctatctactgtaagttctagtatttactggtattagggcaaacgctaataccacgtccagcatgctagccgtcatgactatgaatatcggctatttctgttcggtgcttggaggcgctttcctcggggaattggcggtcgggcgctttattcaaactaatgagcatggccactaaagatcttacatttgactttgatacgttttgcgcatgtgggaattatttatgaacttgagcagcatctgtctggcgttggggataatatgatacggattgacttgactctaattgctctcatcataaatctctcttttcttttccccctcctcgctgtctccgcggtccagagctgcatgcaatcagatgactaaaccctgcgcgcgcaattgagctaatttactaaccggatccggactagcccgtcggtaatatccacttttggcgctagcgtaaggctttaatttactttggtctgagttaccaaaaacagcaggtacaggccgttgtatctgacatatgaccattgtcgagaaattgtaaggtgtctggaaatatgctaggtgaagatatatgattatccagtatagcgtggtatggaagcatcggggagtgaagttcaggctatgggagcctaaagaccactccataaaacaggatcccggtgtcggatgattccgaatcatgcagtctcaaaggggaaagggtcattattgccggtatatcggatccaacggggcttcataggtggaccctgtttttgtcaagtcccgctaactccctcaccttgtacatatatgcagaactcgtatagacctccggggttcaaagagctgagttttcccactttttctaggatatctactcctgtctgattcacttgctacacttattccagctcttctattttaatacgccaacatactcccaatgaagctctccctcctcaccttcacggccatcgtgccattggctgccgcacacttcaagctgatgtatccaacctctcgtggcttcgacgaggataccatgcccaattttccctgcggtggaatgagccagtcttccaatcgcaccaaactgccactgtctggtggctcattccccgtcgctcttcagatgcaccattcccagactgccgtcgaggtccttcttgctctgggcagtgatccgggagataacttcaacattgtcctctcgccaactttccaggtcaacggccttggtgaattctgtcttcctcgcgtcgagatcaatgagaagttgatcggccgtaacctcaccaatgggatgaacgctacccttcaggtgcagaccaacggtgacccaagtggtggtctctatgctgtatgttcacttccgaatttggcggtttattgcggtatactaatacaatacagtgcgccgatatccagttctcttccgatgtcacgtatcagacaccatctgcctgtagcaataacaccaatctcgctgccaccgccttccccgaggcttctgctgcacgtaatgccaacgagtctactgctgagggtcaggcacagagcggatcctcatcctcatccacttcgacttcgactgcctctacctccacttccacctccacctccaatggtgctgctgtaccgatgcaaaccgccgcttggggatttattggtgctgctctcgttggtggtcttgctgtgctgtaaaagctgattatttggttgcttctactttattgtctttggtctcggagtttagcggtgcataataaacaatgatgtcttctctcacacgagacgatcctgttgcgctcacacgactaatcacatcgcagaatgtgacatgcacccttttgtcacttgctgatactctagccatgtttcgcgtagaagattggggtagtctgaatattgcgttctcatcgttctgctgtcttctttccgacaggatgagccttacaattaaccctatgttgcatctgctgacctctgctgcttcaagacgaaaccggcggccgataacgtgacagggaattcccagtcacctatgccgacagcgcagcgaaattgaatgtcaaattctacgttacatatagagagtacatcaaggacattgacaatttgagatcaatgatctctgcaatcgctataccctgacgaacaggtctacccagaagatggtaatcccacgtgtcgtcctagtaattattcgcaaagtatttggatgagcaaactcatagtctcggtaaaatccagtattcctcatcgcccttgcatggcagtggaaggcagatagtatgaagtgtcacgtgtgcgggtagattgacatatcaggcaactaggaaaatggatcatctcaagacatgagcatccaacaaacggagagagttgctagcatagtccagggcatagtccatgatggagaaccttgagatactgcgtccagttggtgagtagatcccgatccctgtcaaaagcagtcgggaaccttctccgaaagtcaacaatgcctgaccccagtaaggtcgattggaacaatattcaacgtcacgtcatcagcttatgttttacttaaacgttgctgtatcagcaaattatttcctaccagactcgttcgtgctacctgtcaaagactatgtctatcaggcatgcgaggccgcaatcgcggaacatccgtcgctatccgccattgtggcggacggagaaaaaagagannnnnnnnnnnnnnnnnnnnnnnnnnnnnnnnnnnnnnnnnnnnnnnnnnnnnnnnnnnnnnnnnnnnnnnnnnnnnnnnnnnnnnnnnnnnnnnnnnnnnnnnnnnnnnnnnnnnnnnnnnnnnnnnnnnnnnnnnnnnnnnnnnnnnnnnnnnnnnnnnnnnnnnnnnnnnnnnnnnnnnnnnnnnnnnnnnnnnnnnnnnnnnnnnnnnnnnnnnnnnnnnnnnnnnnnnnnnnnnnnnnnnnnnnnnnnnnnnnnnnnnnnnnnnnnnnnnnnnnnnnnnnnnnnnnnnnnnnnnnnnnnnnnnnnnnnnnnnnnnnnnnnnnnnnnnnnnnnnnnnnnnnnnnnnnnnnnnnnnnnnnnnnnnnnnnnnnncacccgtcgctacccgccattgtggcggacgaagacacacgagacccctatttcgtacggctgccagaaattgatcttgaccaagttgtgtctttccaggacagaaaaccaggcttgttaagtaccgaagctgatggcgagcctaccccggatcttgacctgcaaaccttgcttgcgaccgagcataacacgcctttcagggctccaaatcctttctggagagtctctgtccttctagatatagaagatgagcggcaatttactgtggcatttgtatatcaccacgccattggcgatggaacatccgggaaagccttccatcggaccttcctacgagccctaggcgtaacggagtcctcggaccagactatatccatcgtcaagtctccaaacctccctcttttgccaaatatcgaggaagtgcacccaatgtctttttccttactctatcttgcgaagaaaataatccaggaaaaagtatactcccgacgacccacaggtctatggactggctccaaggtcctactccccactcaaacccgcctgcggctcgtgccattctccagactccttgtcaaggcagtaagagacagatgtcgacaagagagtacgacaatcaccgcacttctgcagacgattgtcgctcgctctatcttcgcacacatcccgcctgagttcacgcggctcgcctgcaccggcgcgctctcgagccggcgctggctgccagattttatcactgatgaatcaatgggtgtctgggtccaagactacgaagagacctattcccgggcgacagtcgcaccgtctgaaggcttcccatgggcagaggctagacggtctcgtaagacgattcagtctgttctgaaaatgaaagggaaaaatgctagcacgagtctacttcagtttgtcgataattttcaggaggaattgtgtttgtccaaggttggcaaggaccgtgataagagcttcgaggtgtcgaatatcggcgttttggacccgcaaacaaatcctgacctgccttctatcaaggggatggttttttcccagtgtgccagtgtgatgggtaatgccattgaggtgtcggctgttactggtggggatgggtgtttggtgctagctgtctcttggcagcaaggggttgtggaagctgatctcatcaatgaaatcgtagaatcgaccaagcaggacctatattctcttgacgtggcgtgatcaatggggataattcttgcttgggtatagactttttaatgtttaatagtgcatccatagacttatcgggagcgctcttcggatgctgttatcaggtgggcggtgagagggcgataacatcggcggcagaatcatagggaatctacagtctgacctttcccaaccttcttgttaacatctcataacatataactatcaactttcaatatgactcgtggcccctacattgttccggcgctcaagaagcacactgccactgtcatcatggcccacgggctgggagataggtaagtgtatcgctggaagatagttaaacgctagtatcaagtctaacagtgttcgaatctagtggtgccggatggtatgaaaatgcccatcaatcgcctagcctaagccaatgatcgtcgcatctgaccatgattttctaatttctaataggatgtcccttgcccagacctggcgccgccgcggcaagttcgacgaggtgtccttcatcttccccaatgcgcccgacatcccgatcacagttgtatgtgaacctcatattcatcatcaattgaatatcaattgacgagatttcaattagaacttcggcaggcccatgcctgggtggtacgacatctcgaaacttggcggtgatgtgagccctccatgcccaaaattgtcgaataaactcatagtcctgaccattatctccttctatctagttggaattcgaagaattccttaaaagccaggatgaaccagggattatccgctcccgcgactacttcaatagcctcatcgagcaagagatggaaaagaatatcaaggcttcacgtatcatcctgggcgggttctcccagggaggtgcgatgtccgtgttcgccggtgtgaccagcaaggaaaagctcggtggtgttttcggtctatcatgctacatgctattgagcgaccggattaagaactacctgcccgaggggtggcccaacaagaagacgccgtttttccttgcccacggtctcgaggataacgttgtcccattcgcatctggcaagacttcggcagctaaactcaaggaactcggcctagagaatgtttccttcagccaatacgagtatgttttggtcgctgttgttctggattgtgatggtctgcttacttgatattcctacgttacagagatcttggtcactcggcgacccccgaagaaatcgatgatctagagaagttcattgagaaagccctcgccactgaaggagagggtagtgcttctgctggcttatgacttagtcatgatcagaacgagaacaccgaaattggtctttggagatataccttgatcatgggttttgtggtactgcttgctgctgtcatctggtctagatatcagttgtcaaagcagaaacaatctatacagacgcagcattaacaaaccgagcccagatccagctttgagatacataatagtgcaattcaataccggtcttgtaagtgtgagtgataaagtcgggcctcgcctgcttagcgtaggaacctcggaatatatatatctctatgtccatatgatgtatttcaccgacgcatttactccttatagctaggggatatttaccgccaggtggtattaaatgtacatttaaacttaagcttgctaatgccaatgtaatttatgatagcgtggtcaatctactacatgtgcgcagttatcctagcatctggtcggtcgaccatagacctagaagaaattctagatggtatgtggatatatgcagcgtgatgcagtagaagaggtttgcttttagattataatattgaaaaactcttcagaagtcggtagttgtacattgatataagcctcagatatcgaggctgcagatgcaagatgagggaagagtcgcaaacgtatcgtacagccaataaaatcatgacatacgcccagggatatccaagattgcagatagtgcagaaacttcgggcattcgaagcctcgagattggaaagaacaattgtgggaggagaaaatggaacactggcaggagaggtggaggaggttcggagatgtagatagatcaaattctctgtgcggacacagcatgatcacagatcaatagtcgaggcgcaatggtctagtcgggggattatttttcacccagcatctccttgcgcatctcctcccgttgtgtccgcgtttgttccttctcatgtgcgcgttgtgcgtctagagctgcttgcttcctatctaattcttcctgggcggcgtaccagactagaagaattggtcataaccattagccacggatgcactcccagggccgagcgaacccgataccgcagatataatcatctccagggtaaattgcgagtacaagacatactagacttatcggatttggaccactccttcagcttagtgacgtagtcatcgaattcctgcgcccggcggtctccctgttcggcgctgcgcttctgcagatccgggttgtatcgctttctaagctcttcgtcggagggtcggagatattcgacaagagcggggccaccgacgaccatgaggaggccactacggtgagaaccgaatgtgagcacaagtttttgtgacgatgcaggcgagtatcacttacccagctatggtcttcgcccataatccggcgcgagacattgtggtaaatccgaagcgcggatgctgattaccgatttgaggcttcggtatgacgatgtgtttctcggatgactcggggagatataactcgagatgctgagaccgatggatcattaacatcatcgcggctctcatttgctgttagaggcggcgtggcgcagccgatgtggcgcagtaatacgctttgcccgatcgagcgtgccacttgtatcaatttttgtcgcttgttccgtcattcttgaggaagtagtccgagacaggatgtggagtctgtcatacatatgtatacttacaaagtccatacttccgaggtagcgacatgttatacggagtacaagcttgggcagtcctcaggggtgctgtgctgcccgattggtctagggtttagtttaacttagtcatcatggtttgacctcgggacccctgagcagctgtaatccctacataactatggctaatatcacggagtacaagtacagttaccagggaagtacaactggatgccaacaagtcccgtcgggtttgaaattgagattgtgatgggcttgcaggacgacatagtgtgtaggatcccgggccccagcttcacccctgatcgtcaggcaccgagtggactgaattacatgtactccgtaactttcgagctttaccttcacatacaatgatgtactgtataacagctgtatactgcatcgaagcatcaaaggcagtgagaataataaaaggaatatgggtctatgacgatactgcagttctatattccccacttgcgttagtcctctaaacggccgcaaaggagattggatactataaaaagggaaagtataataaagcatgaagagcatgaaatgcatgaaaagcatggaaaatacgaaaaacaaaacaaaaagtgtctggcggttgtgggtcaagcgatttgtttaatttaaagggtcacctgcgaccgcccctaaatcattctgcccccgcttgctttactctttacttgaacttcactgaactcactttggagtgtggctcctgaccaccctcaggtgcttgatcagcttgcggcaggcgcgttggtcattcgacactgcggtttggctttgcgcgaggtacctaggtaaggatcagtgtggagtcccaagggttgccttctcaggatatccatggatcgtgaaatgaataagctaactccaaattgcagccctggacccctggagtttaccgaactgtcttctccttgcatgcgactgcccacaagatttgcacgatcgtgaacgatcctcgaagactactcgaatcaccgttgtatagtacgcttgtcggcctgcgccatgtcatacccccaacaacatcaagcgcagaggccgcctttgcgacaatacagcaatccccctccgcgttctgtgacatcgccaggaggatattcgcaagatggctcccacggaggatacagcgacggtggcatgagtagccatagctaccagcagactgaccccggctacgacgatgcggcatacagctaccagtccacctcctccggttcgcaatcatatgcttctatgaaatctcagccacgctcgatgcgaccgccgggaccaccaggtccgagaaatggacgaccgccaggccctggatacgatgatcggcggggctatcctcctggcggaagaccacccccgcaatcgcggtcaagaacacgtacgtaaattcagacagggaccccaaagccctactaaccgactataagctggcgcacgcccacccccaggcggtaccttcgataatcctttcccctcctttccaagtcgagacccaagagatccgaggccgcctacagacccacgagatcctagagcacctagagacccaagggatcggcgcggtccgccacgagggctagagaatgatatggctgcaatggacattaatggcaggggtcctcctagatcgcacactgtgaattccgatggaagacggccagatatgcgacagccacctccgcgcggaggtccgcnnnnnnnnnnnnnnnnnnnnnnnnnnnnnnnnnnnnnnnnnnnnnnnnnnnnnnnnnnnnnnnnnnnnnnnnnnnnnnnnnnnnnnnnnnnnnnnnnnnnnnnnnnnnnnnnnnnnnnnnnnnnnnnnnnnnnnnnnnnnnnnnnnnnnnnnnnnnnnnnnnnnnnnnnnnnnnnnnnnnnnnnnnnnnnnnnnnnnnnnnnnnnnnnnnnnnnnnnnnnnnnnnnnnnnnnnnnnnnnnnnnnnnnnnnnnnnnnnnnnnnnnnnnnnnnnnnnnnnnnnnnnnnnnnnnnnnnnnnnnnnnnnnnnnnnnnnnnnnnnnnnnnnnnnnnnnnnnnnnnnnnnnnnnnnnnnnnnnnnnnnnnnnnnnnnnnnnggtccgcgcggacctccaccagggcggggccgaggtggctatccaatgggtccagtgcgagctgctagttcaggcagaccaggtcgacctgatagagactatccagactccatgggcccgtctatgcatccgccgccaagaagcgcaacgatgccgctcgccccaggcgcaccactctactcaggcgcaccactctacccaggccagtcgacctaccaagaaacagattacccagcgagctccatgaaggaacctcttatgcgtcctgatactgctgggagcatgcgacccccacggtctcgtgcccccaacgatatagacccaggactgatgatccccgccactacattgatgatcccccccgagcccgccaatcgtgtttcatatgcgcccaaggactttctggacagctattatgagtctggtgctggtgctgccgatgaacccgatatgcctaatttcgatgccatgcccgaccctcgtcatgccccgattgatgagatgggtttggacataacacccgtcaagagaccggtccatggaccgacttcttcgctcgaagagtactcatatacccccaacgggtcggaggctatgaactcccaatctcaaccaaattttcaacaagcagacggtgccggtgccaatcagtttgaaaatgcgggatttcagtttggtattcctggagaagcttcccatgctcccgctttcgaccacccaggctctgctgggtatgtgtcgaacggttacgaagattacgccggttactcacatggctcttcccctgtccgatccaaccagccaggctattcccacgaccaggctgagatgtcagatcctcatcagaatcccgatactcttactcaccacccagcgccattccgccccggtcacgatcaaggatccaaacctgcgccggttcggcagtacatcactcctgaatctatcccagcccttgctgctccacagccaatgatgcctagtggaacggttcaggcgcctgtcacgattgaagagatacagcggctacaacaacaggcgcgagccaatccttctgatcagaagactcaacttctactcgtcaaaaagctagtcgaggcttcgacggttctggtggaggacaacagcagactggatccgaaaaccaaagccaaggccaaagagaagtacgtgatggatgcacataagatcctcaaaaagcttgttacagccgggtattctgaagcccagtttttcctggctgactgccacggtgagggtctaatggggctggaagtcgaccccaaagaagctttctcactatatcactctgctgcgaagcaaggccacgcacagtctgcatatcgcgtggctgtatgctgcgagatcggacaggaagaaggtggcggcaccaaacgtgatccattcaaggccgttcaatggtacaagcgcgccgctgcgcttggtgatacaccagccatgtacaaaatgggaatgattaatctaaagggactgctgggtcaagctcggaatccccgggagggtgtatcgtggcttaagcgggccgctgaccgtgcggacgaggaaaacccgcacgctctccacgagcttgccctcatgtatcagaacgctggcgggaatgatatcatcgtccgcgacgagcagtatgcctcccagctattccatcaagctgccgagctgggctacaagttctctcaattcaagcttggtactgcttatgagtacggtctgatgggatgccctattgacaaccgcacgagtatcatctggtacactcgtgccgcggcccagggtgaacatcagagcgaactcgcccttagtggttggtatcttaccggatcggagggtattctatcgcaaaatgataccgaggcttatctgtgggcccgaaaggccgccaccgcaggtcttgccaaggcagaatatgctatgggatatttcaccgaggtcggaatcggcgctgctgctaatctagatgacgcaaagagatggtactggcgcgcagctggtgagttgacctccctttgactgtttttcgctctagccaactaacctttttttcagcccaaggataccccaaggcccgtgagcgtcttgaagaccttaagaagggcggaagccgaatgcaaaagactcgtctctcacgctcagccgttaacaagcagagtgatggggactgcgttctcatgtaattggatatcttcgtccttcatgatttgccacgcttgaaatatggcttgcatgtatgcatctctcttcatgatcaccggcgcttgatgtattctaccccggtccagaacgcttctcttctaccccatggactgctggattactttattttcttacttgctcatatcctttttttttccaatgttcttccttgtttcgaattgctcttcttttctttaccttctttggtcccccattttattcttatttttattttttacgaatgggatgtgcatgactggaatggacacggtgaaaccaatatcaactggctgtagcatttgtatacattaatagattgttgaacgaattttctttttaacgtacgatgtatacatatacgaagaagtcccaattccccttgagatacccgtaaatccgagccaaagctgcagagcggatatatgggtcgtcaacgggtgaattccgcactgactggatttaatttccaatgcttggccttatgatcgggctctctgcgcttccaaaagcatctaattaatcagctctagttccctggaataagttgtctttctttttgtctgaacatttcaatataaatagaagctgtttggtgatttctacaaggtagtacattgccagctccatccgaaacaagccatatatgtcttccgaaagccgacataacgactcggaaacacgaacaccccattcattcagcggacacaaaatcgctcttgtcactcttttgaccgttctcacggctgtacttattgctctattctgggaagacaccgccaatctgttcggcttccgacgcctccttggatcctgcgcgcgctcagcggcagtacctctatctgcttcaacttccattgcagcagctgcgacagtgaagggaaactcagacgtaaaatccagcatgaaaacacctatttacttcctcagccatggcggggtaagttatctatatcctggttcttatcatggactaaaagctgatttaatacccacagccaaacgtcatgtatgagaccgatcacccggcttaccgtaagctcggggagattgggcgcgagataacaaccaaggtgaagccgaaggctgtcgtggtattctcggcgcattggcaggccggtcgaaatacgatccaggtgaataccgccgagaagactgatttgatctatgagtatgtttgatatcgaaatcatggaaattccgaactaactggatttagcttctatggcttcccaggtcattactataaagagaagtacccaaatgtgggtagcaaggaattagcaaatgaagtcctgagattgttgaaagaagccgatatcccggccgagggcgttgagcgcggactcgaccacggcatctgggctagcttcaagtgcggtatgtgacaatttgcatcaaaacggaaactagacgctgacgaggacactgcagccttcgagccagaaacaaacccactgaacgttcccatcgtgcaagtctcgctcttcaacacagaagacccagaccagcactaccgactcggacaggcagtcgcgagtcttcgcgagcagaatatcctgatcatcgtgtccgggatggccgtgcataacctgcgcgatatgcggtttgcctttggcagttcgaccccgatgccgtatgcggttagcttcgacgaggcgcttaaggatgccgtgacgactgcgcctgctgaacggcagaaggccatggctgagctattaaagagaccagacgcacgccaggctcatccttccttcgagcatttgctgcctattcatattggagctggtgctgcggccgaggacctggggaagaggatctggacgttccccgaggggagtatgagctgggcgcagtatcggtttggtgaggttggcaatgttagtagcgcgttgtaagagatatcatcgaatcatcaccggaagtaattaaattggatttgttttggatatgagcttcgatttcatctataggtacagaagatgggcgtaggacggtgggaacgcggggggcataaaatagatctgcagagaaacaaaaacaagttatagctcctgcttcaccaattgtgtaatgcgctcttcgatctgcgcgtccgacaggcctagaaacatcaattagcattgcaacctgatgcaaaattatggttggcgggggatatttaccggacaacccttcttgcttctccttgccgaaagctattgagagggggggccatgttagcttgattcgcttatccaaagagctcacacaatgggcttagaggtgttctgccataccatatcgggcatagactcgcggctgggtgccagcggcctcccggatcatgatgggagtctgggggttgtgcttcttcatagtcgggtaggcgcggttcaagaaagacctataggcacaaaagaaggtcaatcagtgggctggaactccaatcggctatggataggggtgtacgcaccttgtggccgcgctcgcttcggaggtctggcagaagaggaagcggagctccttgaggccttgagtgaaaacgtacttgccagtcatagtggcaggatggtcaagcagacgtaagtattaggcaaatagaggtctcggatgagccacgggggaatggacgtgggagtagtgggattgatttgctggacagtctgcgatgcagttcattattcacgacggcgttgattcgttgcgcagccataatcccgctagtcccgatatcaactagcgcaccatgcttactcagcttcaacatctaccgaggcctcatatctagcgacagcgcaggagtgatgataagtaggggataattaatcggagtagatgatagggattacttgagagtactccttttatcttctatagactatatttttatctacctgcgggtgtggtgctttagtgcgctatctaccgctcccaacagaaacaccgccgccgccttcaccgacgaccttcccgaggttcatccctcttctttctcctcagaaccaccatctcagctatcaacatgtcttctcgcgttggtttccgctttgtaaacaacgctcgtttcgcgttccgcaatgcatctgcgccattccgtcggccaggtgctcagggcttccgctggcagagctccgaagccggtgctgctgagcatcagaacgccttccagcgtctatggaacagccctgttggtatgaagactgtccacttctggtaagaattcgaatcatgctgcattgcttgtctcttttgctactacgaattgatgctaacttcctgtttcacagggccccggttatgaaggtatgataactcgatttcctggtctgacacaccatctataccccgagctacccttccggatacaacgtctctatcagacttcaccgtatattgcgaggattctctccgcgcctgctgagtacgatgcctaacatattcttctctaacagtggtgcctggtcatcgcgggtatctccgacttcgctcgtcccgccgagaagctctctctcacccagaacgctgctctgatgggcactggtgccatctggactcgctggtgtatgatcatcaagccccgtaacgtcctgtatgtggaacccgatagcagacccgccggccatcaatgctaacacgacataacttcataggctcgccgctgtgaacttcttccttggatgcgtgggtgccgtccaagtgactcgtattttcttgtggcagcgcagccagtctcactcatccctcgaagccgccaaggtgattgagcatgaagctgttgactccgtcaaggctaccgccgaggcggctgagggtgccatcgagtcggctgagggtgccgtgaagaaggctattaagaagtcgacttagataggaaaagaattctgtgaggacggcggggggacttggaagagtgttcctgaatacatctcaaccggtatctatagccacattttacctgcgccgaggtgatccttcaggaatcttgaggtcaagcgagcttgcttgcttgggtcgaccgctggctcgtgtcctcgagaattcagtcctctaattaaacagcgttgtacatataaaccatgtttcgaaatgtttggttactgttccttctgcgagacatggtcaagaattccgaagaaatttactagcattcgtcttgtaatcccaactatcttctgtttggtagttactattcagaaaaccatggtgctgacggtatctcgctccattgcttcgaaatatattggatctagggactttacccaatttatccgggattttcctcccaaccggagaaacagcgccaaatattcctcctatcaaacttgcttggggctatgcttacgcaatgcgaatcaatttatctcctgtctgatctttgacgagacggaaactcactatacaagccattaccataccccggtttctccgcacattgcggagtagcttgtttccccggaataaattgaaggggatgtggttaccccatcgcatgaccgcaaagggggatgcctagctttgacccagttgagctagattggggtaatcgaggaaataaattgttaatgcggagaatatataagctgttctggaggtgctcgagccgagaggattgtcaatctaactcaaagaatcctctatatcctcttgacaccgacgatgaagatttcaagtactttcaaccaggccttgggattttgtttgctaattagtgccgcagttcaggccaagggatactctcgaagcgaggcgtgccacccgcaccatccattcaagccccttccgggcagccaggccagaactcgcacctgtcatgtaatcaatcatggccatggacgcgacgattcagccaatgttcttaccgcattgaagaaatgcaacaacgggggaaaggttgtctttgatgctgacaagacatacacgattggaaaggcacttgacatgactttcttgaagcatgtggatctcggtatgtaatacgcgttggcgtccaatatgagacgcgtgagtacttacgcaagctgccatagaaatccaaggccatatccaatttagcaatgacacggattattggcaagccaacgcattcaagcaagtctaccaaaacgccaccacgttcttccagctcggtggtgaggatgtcaatgtttacggtgagggtactctggatggtaacggccaggtctggtatgacttatatgcagaggatgccctcatcttgcggccgattctggtaggtataattgggctaaatggaggtaccattggacctctcaaccttcgttattcgcctcagtggtatcactttgtggcaaactcatccaacgtcctttttgacggaattgatatcactgggttcagcagcagtgcgaatgtggctaagaacaccgacggatggtaagtcatctgatcaaaagaggaactagcttcatgtaactaataccttacatagggacctctatcggtcaacgaatattgttatccagaactccgtgattaacaacggagatggtaagtttcttttggaaaattgaagccggtcttcttttactaacagtatccaagattgcgtctcattcaagcccaatgttaccgacattctggtccaaaatcttcattgcaacggctcccacggtatctctgttggctccctaggccaatacccgggcgagattgatattgtgcagaatgtgctcgtctacaatatctccatgttcaacgcatcggtaggtttagtactggagtgacataattgcgtctctaacaatcatgaaggatggtgcgcgtatcaaagtctggcctgggactccctctgcgctctctaccgatctccagggcggcggcggatcgggcctggtgaagaacattacctacgacagcatgaccattgacaatgtcgactatgccatcgaagtgacccaatgctacggccagaagaatttgacactctgcaacgagttccccgtacgtgtccatcaatcttctttgtccctcttttcttcattccgaattgatatcgtcgctatggtttgtttctggtcgccgaaggctaacacatacatcacacagagcaagcttgttattgaagatgttttcttcaagaattttaatggtgtcacctctgggaaatatgacccttatgtgggcacgattgtctgctcaagtcccgatgtaagtgcctgagcaccaccggctacaactccccatctgacttgtacaggtttgctcaaatatcaacgccagtggcattgacgttgttagccccgatgggaatgatcagtttacttgcacaaacgtgggttcatgttgaatattggtgcaacgctgaaaacagatttactgacttattcctctggctgtttaggtcgatgacaatttgctggatttgaactgtgcttcctctagctagtgatgagaagtgttggtacatactgcatgatagaatggatcttgtgagtgtttccggggtttaaatctactcacatcctgtacaaagtacagagtagctacttcatggaaaacgttcacttcttcccgagaccggatttgatgccggtttacaatagccgagcctgcctactccatacccgctccatacataggcagagatagatggtactgtttcccaatcataccctcacattggaatttgctatcaatccagaactacagccagccacatagtctatagaccccactattattacatcccgtgtgcgcctggcgatgcatatgtatgcacacaatctactctggtttccactcgattacgtcgatattctttttaaatatctcccttgcttctttttttttctatgtgggcttttctacaccgcattgctggaactgaactctgtattgttcgggattcctgcgctgagccactgcagacatgtatttaacctaatgacactcccaaacaatattttcataccccatttagaacttctttgcaaatccgagtgacagcagaagaaatttctcatatttgaaatccaatacctttcctctcggccttccttacatcaagatctatcatgcatccggattcccaactcgagaccgccgtcaaaaacggctttgacccaaagagtctctacagtacagagttgacgaaggtcaatgagccagcgagaacgattctcgagcaatacagcaagattccagcggagaaggttttgcaacatgtgaaagatttggtttgtggctcaaccccacacgtgaacgataacatttattgacactcagtagaaagatcgtgcctttgaagttgtgagatctcctctaagtccatcttttctgaggtcaaagggttgttggctgatttgcatacgtgttagttcccttatgcctgtattggacaagcctcattccttgagctgagcatcgcatcgtccccatgttatcctgagatgcttgaccgtgtcaagaagggagacagactacttgacttgggatgtgcatttggacaggaactgcgacaattggtaagttgtgtcgagcaaatgaataacatccgacgattgcatctttcccaccttaaccagagccggctaatcagaataattccggaaattcagatctatgacggcgccccatcgcaaaatctgtatggaacggaccttcgtcctgagttccttgagcttggccttgacttgttcctggatcgctcatttatcaagtcccatttcatcgatgccgatgtcctcgatgataaatctgctctcgttactcagctgacaggcgagctcaacattgtctatatctcccttttccttcatgtctttgactttgaaacacaaatcaaggtagccaagagggtacttgatttgcttgccccgaaggccggttcactcatcgtgtgtcgggttgtggcctgtcgggaccaagcgatagggaacgccaccaacgcgcgcctgccatattattaccatgacttggctagttggaaccggctgtgggagcgtgtgcaggaagagacgggactaaagctaaaagtcgacaactgggaacaggatgatgctttggcaaagaagcaccctctagagggcatctatatgctgggttcatcgattcgccgggagtagggctgctcgtctgtagtacatcacaatgaaacatttgcaagtggctgtattgtatacgtcgtaatttgaattgacgatcacggcagggatggcgaactgaacgctggcaacgagacaacctgattctgatttaagcaggactaactaaagacaagtatgtgactatgcatcatatttgttcattgtcattttatttgaacaacaggtaatacgccgccttcactagttacctgtacatgcatgcatacgtacggatagatgtatttatgtatcgaagttccactattttaaataccaagtacgtacgatacaatcaaaaaagacgagtttatatgtattatccatgtaacggtatgataaggatagtgacaacataaagcctgaacttcgaaggttcttcttctctctcctgatatgttatatctttacccaagagtgatgcaatcatgggattcttttctagcacacaaccacctcgacctgccaccgtgccgagcgatgagatcatccctctccatttctggaatactgctttatgtatgcgcggcacggttttggatatctcgctgaaatttgatgatgtgttggatacatcaaaactgcgcagtgcgctcgaggaactgctcgagatgaaagattggagacagctgggtgctcgattgcgtatgaacgtgggtggtttgagaccggcctccgatttacacgcttaatgctgacccggaacgacctgatagccaaatggaagacttgaatatcatattccaacgcgtttcgacgcctcgcggccggctttcgccatgaccaatgctcagcacgagacaagcattgccgaccacccccttggcgccagaataccacatgcaaccagcacgcctgccatctttccatcacctgatgtgttaagccctttattacgcagcgaagacgcacccaaaaatattgatgactggatctgttcagaccggccccaactatctatacatatcatcaccttcagtgacgccacactaattactgtcacatggctacacacactgacggatgttatgggaatggcattaattttgaatgcgtggactgctctacttcgagggaacagagaggcggttcccaagctacaaggtttccgactagacccgctcacagaactcggccagcgcaccccagcggaaaaatacatgcatttcaaccgtgtgtttggccgcaaagagttctggtggtttatcggattgaatgttcttgacagactgtggtaccgccaggaggagcggcgtaccatttgtattcccgccgccagtttgcggaacctctgccagcaatcatccagtgagatctgcgcttcacgcgggaaagaagagccagtgccctttgtgagtgaaagcgatgtgctgttgggatggtgggtgcggagtctttacagcgcgctggggctcaggacggaccaaactatcctagtgaacaatgcgctaaacctgcggacatctttgcatgaatcctttacgtccaacaatagtgcatacatgggaaatgcactgtgcatgtcgccgacctttctacgcggccatcaggttgccgacgagccgttaggccaaattgctctccggattcgagaatctgtaacggaacagcgaaccccagagcaggtcgaggcgatgacagcacttcaaatgcagacgatggaacagacaggctatctggccttggtcggcgatcctcggatgatgctgctatcttgctccaactggcacaaggcccgtctctttgacatagacttctcgtcggccgtgttacaaagctcgggtccgtcgagcctgcagaaccctcaacatacaggaaagccatgctatgtgaatggagttcagcactccgcaaattcatttcgcaacgttctttcagttataggaaaggatgctggcgggaattggtggttaaccggtgttctacgaaccgatgcatggacgcatatcgaaaaacaattgcacaaattggggtcgagctaggttgtattcaaagtatcacaattaatgagctatattcatgtgatgtttttttatatcggtgtacggtgacttgaatttaatctcttggatttgtatttccaaggttgcgatacttgcctttcctgtaagagtaatgtattggttaagcacattatcccgatataaaatacagagcgtgagatatgttctatacggagtacataaatacacatacaactaaaatactcgaaaaccgaaacgaaattgttttagcgtgagatcccgtctcgggccgcacgggacggactagacccataatcaaatacggctatacggtatgttatgtgtgtgtgcatacctgaaatgtgatacagctatttacatagcaggtgcagtgacgatccattgatatgtaaaatagtacgtttaaagtccgtatcaactctaattacatgacgacttagtagacttgtagatcggatcagtccttgcattagcatgcgttggcatcggatatcaccgaaagtagaaccatatcctgcacctgaagacacactcgttctcattttcgaaattctgttgacaaaactgctcatctgagatcctctacacaaagcaccaacaatggaggaatcgagcctgctctcagcaatattggatcatagagatgccttggcatctgtcgcagaatttctccgaattctggctggaatttgctggactttaaactacttcagcatgttgcgcacgtcgcgaaaagacaagattcccagcacaggtatctttcctctctgcaatgacattgggtgggaattcatatatgcctttatctacccaaccgcgagcgctcattgggaaggaggagtccgagtctggtttttggttcattgcatcgtcatcatcttcatcatcaaatatgcgcacaatgagtgggaccactttcccctcattcaacggaacctttacttcctatatggagtagtgactattggcttcgccatcggccaatattcgtttgcgcgagaggttgggcctgacttgggatttttctacgggggtgtgctgtgtcaaacgctggcaagcctggggccaattgctcagattctttctcggaatagtacccgcggtgcttccctattgacttggtaagttcaaagctagatcagctgtttgcattcgtcattgacatgataaaaggctattgagagcgattgctacttttggtggattcattaagttgactatctattacctcactggaaatgctgcaggaccttggtttgaaagcccaatgtgcaagttctatatcgggttgaccttggttcttgatttcacctatccgatctgttactatgtcattcagcgtcaggagttggccaatgctcagaaggagaaaaaggagaagagcaaataggaaaagccatcatgaagcatgatagctggatgacaagttgttctgtgaggagtacggtataatgctaggtggttcggcaaggatgaaagttgggttgcgttcaaaagtcttacatctccggtctatgtatttagcatgaaatcacatatttacgaagctcaagaagtgtcacaatacatcaataaaatcctataaaaaaaaacaagtatctgcaaggagcgaggattgcgcgcattggaacattttatagataaaaaagggacgaacccaaaaaggaaaaaggaaataggaaaaccgcacatagcaaggcatattgatcatcaagggggaaagccaacaataacttgcattgtacctatcaagtgaagcggtacacgtccctgtttcgtaacttcatttatctccgacattcttcaccgccaacaacatcattatatgtagcactagaaagatttgtctttttctaaatgcagacatggaggaaggcatggaagctcccaagttcaaagtcatcattgttggggggtctatcgctgggttgacattagcccattctttgtcccaagccaatatcgaccacgtcgttctcgaaaagagagctagcattgctccccaggaaggtgcctttattggagtctggcctaatggagcacagatactcgatcaacttggtctctaccacagtctggaaaagctcactgcaccactaagtcgcatgcatctttccttccccgacggatactcatttagcagtctcctgccaaagacaattcatgaaatgttgcttcccaatgtctctgaaacccagatatcaaacaaattctgactactcaaacgtagatttaagtaccccatcgtctcactcgaccggcaaaaggttcttgaaatattatttcagaactatccaaacaaggaaaaaatcattaccaaccagagagtatccgaagtgcggttattgggcgacagtgccagtgtggtaacagaggatggaagtgtattccaaggagacctgattgtcggcgcggatggtgtccacagccgtatacgctctgaaatgtggcgactggcagatgaactacacccaggaatgatcacaccccaagaaaggcaaagtaggcaacatcgtcctcttcggaaattgattactttggagacttcaactgactcctgaatttcttcccgttagctcttacggttgaatacgcatgtgtgttcggaatatcacgagcaatacccggactccgaagcggagagcatataaaccattacggcgacaaattctgtgtgattaccttccacggaaaggatggtcgtgtgttttggttcattatccaaaaattggaccgcgtttacacctatcctaacgctcctcggtattctcctaatgatgcagcggagctgtgtgacaagattcaagacgtgatcatatggcgggatatcaccgtaggggacctctggaagaccaagctggtatcgtcaatgacggcactcgaggaggggctttttgaaacgtggagcttgaatcgaatagtcatccttggggatagcgtacacaaggtgagatctgccagctatcctggatgaactggatttccaatgatctaacaatgtttcctcttcgccagatgacacccaatatcggacaaggcgcaaacacagctattgaagatgttgccgtccttgcatctctgataaatcgggtagttcacgcagatgccttgcacaaaccatcagaaagctgcatcgagacaatgctccaaaaatacaagactctccgatacgaacgtgcgaaaagcacatacgaacgctcgagatttggcgctcgattccatactcgagacaactggcttaaggctctggtgggccgatatgtgttccaatacgttggtggcctcatagagaaccggacatccaagactctggcaggggggaacgttattgattttcttccgcggccgcacaggcttgagactgggtgtgtgacacgtcttcccaaaggccaaggaaggcctcagcagcagtggacgctactctgggtttcctctctggtcttattcttgtttttaccttggcttagatcatatctgccttcggccaccttctggtgaatacttctcagcagaaaacatttttgcagatctttgtgaaggaacttgtgtatttgtgtttcatatgtgacagtgtcagtacaaagataattcaagtatcgggtgtcgatcatcaacccgatgagattattcgctttcgaattattctaaaaatactagtgggcctgactagtatcattatcataaattgatcgacgaaggcaaaggcgcaaggcaggctagctgaacaccacataattacacaagggggtgtgcatataaatctagttttataaatatagtatggaataatcgagctaatgcagtagatccatgcatctgtaaccagccaacaaaagctcgctcaaatggaataagaattagctggccatgcaatcagtggagccaaagagggcccaaggaatgatctcgatggcgaaagggatgctcttgttgttagacttttacagatgtgtccttgaatactttccacttcgatttgacttatctgatacctgaagtgacctttaccgatataattcataaacttctttctctactgtcccctttatcatttaatatttggctgtcgatacgccttcactacatatctacaccattgttgcctctgcatttcgcccatttcgcacagtggttcagtattcgctgaagtcctcatccccgaattccattttcatatgccacgatgacacgagggaatgaaaaagaagaagccccaccacaggccaaaatccttggctcgtttcccactggaatagcaccctatgccgagttgatgcgtgttcatcgactgttgggcttttacctgaatacatccccttatcttgtgggtgttgccttttgcgcatccatctcacccacaaagataccaatcactgttctcttgcaccgcaccatacttctatccatctggtctattttccttcgaagtgctgggtgtgtttgggatgatcttatcgatatggacttggatagccagatatctcgaaccagaacccgaccactgccacgaggcgcagtatccccgaagaacgctttccttctcactgtgactctcttcgcctgtgggggcagtgttttgatatatcttccatggccctgcgccgtggattgccttataatcacattttttgcattattgtaccccttcggcaagcgattcaccgactatccccagatcactttggtgaacatcggatgggccattccgatggcaatgcacagtctcggattagatcctctatcccagatgaaaccaactgtgtgcatgttcctgtttattggattggtcatcatcatgattgatgtaatttattcgcgccaggatacggaggaggacttgaaggtcggcgtgaagagcatggcggtccgtttcagggagtccatcgagctcctgtcatattctctcctttatgcatccaccggattcctcgcgatggcaggattcttcactggacttggcctgtcatttttcgtggtgtctgtcggcggtcatttctgcgggttctgggttctccttaaagcgactcgggtagggaactcgtatggagttgaatcctacgccaagtccgctttcttccttgctactttgttttggttgtttggatttgtgattgaatattgcctgcgtaactagatgactttgatggttctctacttgcgaaggtaacggggagacgacagtttatccaacgtgtgtgccattgttcacctaactggtggcccaccccaagtcacgtgactgatggcctatcttatctccaccggttgggtcaacttctgtaatttggttttaagcctcaccaatacctcaccaataccaactttccaccagtcatttctcgtcaacacctctcattaaccatccagtggaatcaggaagggataacaccttaatgaaacgctaatagtatattattctatgcatccatagaatatgtagtacagtatatctgtctaataacgccttaaaaagatctaaatgtaattaagcctccggtatttatgatgcgtattctcaagaccattaagtaatcactgataagcaaccttggaagttcaaccaaccggtggagatttcacgtgactcaggtgggttaggtgaacaatggcacacagattggatcaagaactcgagacttaatacctgactagcgctatacactttcgcagtcttcatatatatcgagaagtaaattttcaattgaattttattaagatttcaagcccaacgtttggttcattcagctttcctcccgttaccgaatccaaaattcaaaacgaatctccagttagatcacagaccaggcgttgtcgatgggaatgattgccccgttaattctcttgctctgactagagatcaggaatagaagacagtcggcaatatcctcagcctcaacccccagtcctttctgcctatcagcagcatgtgcctggtgaattagagacattgttcctagtgcatccttgtcccaagtgcttgggtcagaggcctgtactataccggttggaactcctagtgtaaatcataagcttctaacacaaatttgatcttaatagcatatgttggtccacgtacccccgggacaaacggcattgcagcgaattccctcttgtttgtacctccatgcaacatttttggttgcgcccatcagcccatgtttacctggaaagtaggtctgtcactatgctgatgcatacctcgattcatatggatatactcactagctgtgtaagcaacgccggacgaagcaccactcgtagctgccttgctgccgacgttgacaatactaccactctgttgctgtcgcataataggaataacctcacgcatgagcttcactggagctgtcaaattgactgcaatgcatcgttcccacatataatctgagagactatcaacgctggaattctggtccatgataccagcaatgttgagcagaccatcgattcgtccaccaaactctttgatacaggtctctaccacctgccttggtgtcgtctcatgggtgagatcaccttgcatgaatttgtaatttggatgttcattgagtgagacaggtgctgatgagacatcaacacctagaattctcgccccttggcttagagctgctgtggctgttgccagtccaattccagaggcgctaccggtgattatcacaacctagaacgcaattagtaagaaatttggacgatgagagatgttagcagctggggcattacaatgtcttgaagcagcgacataactttggtataatgagcaacagaagaaaaagagaaatgacagtccaattcgattgggaggtaaaagtagaccctggaaacagtctttgagtgcagtctctaggtttacacccactaacctttgcagtaccttatccaggccgtgtcttcaaattatttcttggccccgcatatgacagagaaatctatgatcatcacgtgtatcctgaacatcattcacagactgactagaaatgtgactatacgaggcaaggggaccagatgcaacacgcctctataactctatgttatggtgcttatcttgcatgcaataaagccaccttctgcaacatgcggagcagtggagctctttgtgtcgatctcaagatcaacaaggaaaaagcaatacacattgtgacacaccaaaagaacaaagttactcagctcagccacatgatttaaggactgcgcgttaatgcacgttggactgcagagctccaaaaattagctcagttgatagatcgtgttttggcctcggcccctgtgggaggtattctgggccctaattactagtcgtaataatacggcaaagaccgcattgtatatttggtcaactatctatctgaccgctgttttcgatcgtgggagtctttgtggcacagttgaaggtggcatgagcaatttactacgagtttcaagcaaatcccagtatccgagaaagcttcttgaacaacagaatgacgcaggctcagaactatgtcattccaccaggctctaaagtcctcgttactggagcgaatggctacattgcctcgcacatcgtcaaggctctattagatcttggttatctggttcgaggcacggtacgcacgcctatgccatggctggcggagtatttcgagagacagtgcggtttaggacgtttcgaactcattgttgtttcggactttcagcagcccgatgcttttgatgagagcgtgaagggtgtatcgggagtcattcatgttgtatgtttctttggtactagtggttctgacaacaatatgtgttaaccaaatagatgtctaggctcaaggcttaccttctagcactgctgcagaaaccgtgaaaagcgcaacagcttatactgtgaatggagtcatcaatcttttcaaggctgcatctacacaacgcacaattcagcgagttgtcctcacttcttctatcgtagcggcaggctaccctaccggaaaagggttcaagttagatgctggtaaggcaactgtcaatagataacaaacctaggctgacagaatctatatagattcatgggatgaaagcctcgaacaggcatctaaagatggaaccactgtacccatctatcgagcatgtaagatcgaaggagagagacaagcgtggaaatgggttgagaagaaccaaccacactttgagctcaattccgttcttccatggcttacagtgagtcttatcgagaatcatatgtttatatacgacgtcaaaagttgaactaaccacggattctttcgaagttgggcaaaattcttcatccgaacatcggtggttcaaccatgggatatgtctctggactactcagaggagataccacgccattcaaattccttccactgcgttagtattccaaatcaaattgacagacctattattgactaaagtactttgctagcttggtttgtggatgtggaagacactgctcgtctccacgccatagctctgctcaatcctagcgtgcgctccgagcgactcttcgctactgcagctccattcacatggggggatgtcattgaaattctcaaaagaatccaacccaataatgctcgtattccagctgctcctatacaagaggaaccgacgctcggagatgtcgtcccagcagcaagagccgagaaattgcttcgtgagacttttggacagcttggctggaccccactggaagtcagcctagagagcggtatcgcaagagagtaaccgatgaggtccggtggttgaagatgatatggtcggactaatcgagtacaatggtagattattgtgatgttgtgacagttcatatctcgattgaaattcaaaacgaagggttactagatcaaaaataccatgcccattaggggatctttccctctgacttcaagacttgcgttaaaagatcggggagggctacagcgatccccggctactgtagatcgacccctctctgcctgaaatttcagtttcaccttcctaattgggcacattttctgcctcgacacctgcccacaccgccttctggccttgactccccatataatagtagcaagacagcagatacctacaagttatatgtaaaccaatagcaaaatttcatcagccgctttaccgtcaagggatgaaatcctatagtaatcaggtagaatatacgaatttttctgatcaaaatacatgttttttactatgtaaaccagaatgcatgtagtggtggcagaatatatgggggacgccgctgtggtcaaaatatataccataagtgatacctgtatgaacatgatcataggaagaggactgatactaaagctagattgatacagaaagacattgtaagagcatccgaaaggttcattcttatattaatgtgatgattatcaccaggtagaattaagatacaattaaacatcgagagtgccgatcgactaatatcgaacatgatcacgcaaaaactcataaccatcttcaacagcccgagaagctgcctggtctttttcaaaaccaggataaatgtcaaacaggtgtactgccttatccacaactcggagttgtacctcaacgcccttcgtaaccagctcctgtgatgtcctttgggcctgttccactggaatgagatcatcaagggttccgtgtatgatgaaagtgggcgtcttgtaatgcccattgcgaatctgtgccagagggctcactgcttggatttcctcaagtgtcggaacgggcaactcctctccacagtcgccatctttatgatccgaccagaagcggccgccgtgaagcaacataggcaggctttgtcctttccagttcatgtgcaacgcaattcggctgcgaggatccgccggtgacatccagcctccaagggccttttggtcgaccggaggattgtaggcagtgattggcgtctcatatatgccttcccacaggtcgtatcgcatttctggcgaggcggcattctttccgtaagggaaattgggctgggaccaaaaagagtcttcatagtctgttgggccgtagaatgcgaggatagcgttaggcggggctatgcccctctgctgagaagtccaagccaatgtcatggccagatgggcaccagtagaccagccaaccgctaccgcttgagttccgtctggttggatatcaggacgaccaagagttaaactgggcaggacatggcgagcccaacaaagagcatcgcatacatcatgcattgggccttcggtcagggaaacctctgggcagagtcggtaatcaacactgactggcaagaatcccgcattcaagagcattctgacttgcttgctgcggatgtcccggcgcgagagcataatatgcccgccgccatggataagaagagctgtttgtcgagtgtaagaaggagggttgtcacggttcgaggaaagaggactgggaacaagttcgtctacataccaattggacggggttttccaataggctgaagatcccgaggatagtaaatgtctgcagagagctccacgccatcgttcttgccgtacacaatagtctcttcgttcatgagatataaggggctcctgggggacgggggtaaaatgacagccgaggttggtgacgcagtgatcacccgaagcacattggattcttgggagtcattgtatgtccagtccacccattggaaacccgattgggaaagagtttgtttccacacgtgttcggtcgcaagggcgtgttgccgaccatcctcaaagagccaccagccctccagcagaccgaagacaagatcaaaccagaataagttgcgtgtgagctcgattaggcaaagaagcccgtctggccgtagaagcttgttgatattggaacacgattgaacgagactgcgggttgcgtgcacacagttgctggataggacgatatcatattgaccgagcatgtctggggtaggagcccgttcaatgttgaggacttggtatttcatgaagctgtaatgcttgaacttcttgcgtgccagagtcaggagccccgaggataggtccgtgaatgtgtattggaaacgaagaccaggaacggcagtcagctgacttaacaaagctttggttgtgcccccagtgccacctccaatctcgagaatcttaatttctctggtggtatccacgcggccaaggaggttgacaagatattgggctaggtggttagttgcagccttgaacattggagcgttcgtgtatacatcctccatcagtcgacgagcctctgcatcttgaaagagaagagaaagtgggtcggcggctccgcttaagcagtcactgagtcgcgagcccgttgtcctcagcagattgtgttcagatgtatgctggggatagaggcgaataatttcctcgtgcaatacatcggacgaaatggtggatacgggaaccgaagttcgcacaaagccatggtcagtagcccggatgagattggaaaactgcaagatggaataaagctggcttcgaaccttgctatgctgttgaagaaccggcacctgtgggataagatgctcagcctcaaagctctccagggagacaccgagggatttgaaagcctctaccacataagctgtgacaagggccatctgtctgggatatacggattcacaaaacccgtcccattgggtagattgactgtgcaccatacttctctgaatatcagtgaaaaggcccggtgcaatgtcaatgaggccatgtatttcttcatcggaaattggggttgggataacatgggtattgctctccgagtcaactgcttctgtagtctcgatttgcaatgacgggtgaactccatttgtgagaggagcagttgcggcatcggggaaaattgtctgcaccagcgttaggatatcggggatctcaacgaaggaggaagtgtcaatggtgaaattgaatctcttctttatctccaccaaaacctcagttcgcatcaacgaatcaacaccaatgtcttcgagattcgatgatggcaacaactcatcggaggcaattcctaatagatcacagagcatctcctggacgaccataaagtgtccactatccggggcagagtggagaggagccggaacagcggctagtgcattctgaggggtaggattgagtgcaaccttggagtcatcgcgaagagactggcctagaggcacttttttgtcgtcgggttgattgttcaatttcttgagtacccgggaaagaccggcgatggagacactggtaaatgttgccgaaagaatggtgacagcaagtttatcggtctcccgatctaggacaaacgtatcacaagtgatcttattcttgatagatcggtccacgttagagtatacagcccacgaacgcgagcaattgggatcccgggtcatgaaagcctctccaatcaatatttccccaaccccagtgcaaacaaaaacctcatcttcttttgtctccgaaagacagttgacgtggattccagcgacttgaatgaaattgtcgacgagcattggatcacatgacgcgtcctttgtccgggacgagggaaggttcacgattccagcggcctcatgatcagtcgcgaacacttgttcaacgccacgataataatcagcgtaattgacaactctgcggaaggcttgatatacggcgaatcctttaagaccgctcgactctcgtgaattggcgatggagtccactcgagaagaatcaatcaatcggttcatggagtgaagtcgaacgaagagaggtgtattctggccgaaggggtgcaagctgatctcaccggttgcatgtgtggtgactttattcttgttggactcacgagtgaagagggagaatgaccatgtggagtcacccacccgggcgcgagtaagactcaacataacatttcccctagggttgagcacaagcggagccgaaatggcaaggtctttcaggtgaggcatggctggtgatatatcgttttctgggcgaatcagtcccgccgctcgaacaataatctcaaagtagagagaggcagggcagaggttttgatcaagtactgcatggccttgtgtacactcctgataaagagggtcattcgtattaatggcaaacacacactcggtcggctgctttgtgagcagctgcacaaactctttcggggcatcagaagaaggcacagttggcttgacttcaggcaacgacgcgaaggcatttgggtcgtatccaatccagtgacgtgtttgagcaaactggtaaggtgggaggttgatccagttgtagctcttggcttgggaatcgtggaactgccagaactgtaccttcacacctctagaccaaaggttgcacgtagcctgtgaaaggcttctgtgggccagtgcgcctcccaagtcgagcgcctggtagacatgcccatttgaaaaggctgccactgtatcgataacccgtcgtaccaacgggatgatgggagatgcggatcccgcctccagccagatagcagggccttgaatcctctgggccacccgctcaacggctgtctggaagtcaactcgtctgcggctgtgatccacaatcttgcctggggtaacataagtccagtcatcatactgagaacaagcctcaatagggatagacaatggcttgtattgaagctgctgggctaccttggtcaggggaggaacaatgttatcgaccaggcgggaatggaaagcatgtgtgttcttcaatctctttgtgcgaaggatggagggggctttcgccgacagtttctcaatcatttgtagggatcgctcgtctcccgccaatatggtattacgtgggccgttgacacaagccacatccactgccacatctgccatatgctctgctgcacgattcagcaaaccctgtacctccacctctgaaccctccactaggagcatagctccacgctcagagccccacatgctgtggatcatcttggctcgctccgagacaagataaagagcatccgaaaggctcaacccgccaccgacacagagtccagtaagttgaccaaagctatggcctataattcggtccacttgcagtccggaatctatccatgactttgctgatgcatattggattgagaacaaaatgcagtgaaggctgacggtatcttcaattgggccaggttggaagatactcggaaagaggctcggaaggtcaagagtttgacaaactttttcacattccgtctaagacagcgcagatggactgttagcaaacaaaacatagagaaatcgagatatttccaaggcttaccaagtgatattgaagcagttcacactgattaaacaggtcttcggaaatggttgcttcgttcccattttgcccaccaaagcacaagacgacgggcagacgggccgccggttgtttctcaagatttgtagtctcacgtgatattgactcaagcttcgcaataagctcgttgggtcgatctacaggaatgctgaatgctgaaacgtagtccatgtctctgctctgcttgattgccaagttataggctgtgtcttgacaactggtcagttgtgcatcgcagacgcttgaaagcagagctttgcagtatgatctgagtgattcaacggtgttggctgctagaataacgggcacctcactagggaggggagaaactggattcgaaaggccagattttgctttgtattgtttcacaacaagagccgcgttgcttcctgcagctccgtaattggtcaccatcgccacagcagtcgaagatgaattagcagcggagggccagtggatagacttggttggaattgcgattgctgcatcgtccaatgtgggaatcttggggttcagttgaacgaaattggcctgcttcggtatctggtgtttctgcatcatcaggacagtctttagtaggccagctacacctgaagaggtttcagtgtggccgatgttatctttgacagatccgacataaagcctttcggtgcgcgcaggtcttccaaacgttttgcggatgctctcaaattcaattgggtcacctacttgtgtgccttgttatttgtattagtgaatatatctcaaattgttggtgtggcttgacaaacctgtgccatgcgcctcaacataagtgacgtcttctggacgaaccccagatgtcacgagggccttccgataaagggatatctgggaatccgagtctgggacagtgattggagagcggttggacccctgattgaccgccgacccaccaatgatggcaagaatggggtctccgttatgaattgcgtctttcaagggtcgtagaacgaccagccccgccccctctccacgacaataaccatcggcactcgcatcgaaggccttggaagcaccagtaggtgagagaaaggaggctgccgccagattttgtgtcactctggggctggtcatgacatttacgccgcccgccacggcaatagaacattcattagtttgaagtgcctgcagtttgttaccagatcaccgagtcagtcacttcttcgtcgcccgagaatatcgtggtttgaggagtagaatcgaatatggaatcttaccttgcatgcaagatgaatagacaccgcagctgaggagcatgcggtgtcaaccaccaccgatggcccagtccacccgaaatagtgactaagacggccagtacagaacgcctggagtgttcctgtagctgaaaaggcgttcgcgttgcttgatccaacattgtcagtatagtcgtccgagccgacaccaacataacaaccgacgtcggttgggatattggaggtgcgaagaccacaatatccagctgactccatagcctcataccctacctgaaggagtagtcgttgctgggggtccatagcctccgcttctcgggccgaaattccaaagaagcgatgatcaaacacatctggattagctagatagtttccccagaatggcccttttggctcgcgaagaaggttttccatcttgaatcgctcgttgggaagtgcgttgacaccacaccgccccagctcgagcatctcccatagttgctctggagaatccgcttgggcatatcggcaccccatgccagtgatggcaattgggatcactgtcgggccgataggggccatatcaattgaaggcctcgatcgagttgtggaagatgatctgtggattccatttggcagaattgcatgttgttttgtgtctgaccacttgttgttcaagtgatctagaacgcgggttctgactagacgtggaacaaactggccagttccaatgaccacgaaggctaaatcgtcatctgtctctctcgcttgctcaaatgcggctgaaacagttatagcccactgtgatggcttggtcaggattgattctagggcagttttgtgaatggcaaatcgtttcccaatcacatggccatcgacattagacctcagtggaagaacacagggactagtccttgctaacctgaacctggcatctgtctcacaaagatctgcaaggtattgaacagctgtgacatgtctcgaatgatgaaatcttcccttcaggtcaatgattttcaccgacaatccatgacctcctagctccttggtcaaatcatccacttcatcttccgcgactgtgactgtgactgaggttgcatccgtaaagcaggagatgtaggcctatgtgttgtcgatattagattatccgttcatcacgtatgtggatcctcggcccaatatcaagtcacatgatacccatatcaacatgtgtcccccccgttgatactcccacaacctcgtaacccactattaagcagagggaagataatttgaagtagaataacatggggttattggcggggtggatatgttacgcaccgttgaagagctacccaacactcgatcgagttgttctttctcactatccgacttccatctcaaagcaacagatcgggccggaccatgcaagatgccatccaggtcaactgctgctccaatgcaaactgccaatcggatcatagtggatgcgatgtcctcaaattcgttggaatcattcgagctagcgactgcgaccgccgctaagaagccgacacaaaacccctgggcatccacgattctgcacctgttctgggactcttctttgaatttccacacatcgattatctgtcgaataacagtaagaggcgtcatgaacacattcattgcacttttgggagcagctgtcgtcccctgaacacattcagcaagcactgtaagttgtgtcgctccagggattgaggataaagaggaccaagcatctgtaatgggcgaccatagcgacggtagttcttgcaagacatccttgaggaatcccaacgatggattttcgtcgatgttgcggctgatgtaaaataaagtttcatcaatctcggaactctgggggccgaaaacaacacagacgggccgacccggggttttgggtggttcggccatggcaagttgaatatgtaaagcaagattattgtgaggaataagacaaagcgaagagaggcagatactcccaagttggtacctgatgttgaacaggtttcagtgtcaagaaggaaccttgtccatcgaggcacatcaaggttataatggaaaaccgagggtttagaaaaacaaataccgatacgacctgcatacaatatctgagccaaaagcatgtacggactcaccatagatgatagataacccgatatagcagtgtctctcccttgctgtttgactctaaagctgaagacacagcgattctgcacgcaatatccacccagctgcgggatcttcaatggatcagcaccttatggcgaatataccgatatccagggctcaccttctcgggggtggctggctgatgaagatagactatgggacggaacccccgacaaacttctgaggcatcagacttttttaactacactcaataaatatattacatacatatgtacggagtatgtatggtacgcttaagttgtcgtttcattctttggagtggtatcaattggtattctctcgaattctagttcgccctgccgtacggagtacgtactccgtacggtatttcgctgatttgttgatttgtttaaggttttcttttcggatgtttaatttatttctaatttatattttaatacgagtcaattatttcatgctaggcacatcggaatgtgacattggcatcttgcattcatgaatgtttatttatttcctaggttagataatgcttagtctacacccgtgccagggaagaaagagtccgtggggatagcatagtccttgctttatcgtgctaaatatatatcttgcttggctctgactctatatggagtaatccgtaggctgaaagtgattagtttgttgtctcatttttattatggctcaaataattgcttgccctaaagcatacatagctatggcagctttgggaatcgattagttccaaatttgaatcatcaatatatgttgggttgagtacaggtttggcttactatggagtatcttctttatgcttccccattcaccgagccttcaatactctgcaatcatagacaagcattgggggaatgtcacccaagttaaagaatttactagtcatgctagtgccgtcattggtcgaactgttatagctcagacgcaaggcatacggaataaaaataattggaagatgatcagacagagggtaatttcccagtacaaaaatttcacaattagttaggcaattgcaccccatacagggatactcttttgaaacattatccaagttttcatccgaatccagttgtcagccacatcacgcatggctccagaagaaggcgaccaggcgatgagccacgaagacaaagctgcgtgttcgtctctgaacacgacaagctccacagagttattcgacggagcaccatcaagtgagaatgagcggcttcgcattcggcaggctgcagtggacgcaatgcaccatggatctcccaaaatcgaccctcagatctggaccgacgtgacttctcacctcagcggttctaccacgatagatgcccgccaacgggacattttttttgagaatttgacggtccatggaaaaggatcctcgctacaaatccaaaaaactgttctgtccgcccttctataccccattgcgtaccctgtcaaacgactcatgagcattgttggtaacaaaaaacctcacaatgatcgaagaacaatattacatggattcaacgggattttaaacagcggcgaattgttgctggtgctcggtcgtccgggtagtgggtgctcaacgttcttgaaatcactatgtggctaccttgaaggcttagatctcgacccagtcagtgagatccagtataggggagtaccattcagagtgatgattgaaaagtaccggggggatttagtgtacaaccaagaggcggatcaccactttccgaacttgacagttggtcaaacacttgagtttgcagcgcatgcacgagcaccgcataatcaagtaggcaattcgagtcgagaccagtatgtcaaatccgtggtgaaagtggttatggatacatttggtctttcccacacatacgacacaaatgttggcaacgactttgttccaggcgtcagtggaggggaaagaaagagggtcaggtaagctcattctgttcggcttggagcaagaggggagaaggaaagggtatgagaactgatacaatagttggtatgaacagtattgcggaaacggttttgtcacggacttcgattgcggcctgggataacagcacacgtgggcttgatgcagccactgctgtcgactttgttcggtcccttcgtacctcagccaaactagcgggatcttgtcatgcagtcgccgtataccaagcctcggaaggtctttacaataccttcgacaaagtcattcttctatatgaagggcgagaaatatattttggccctcgtcaaggggctgttgcatactttgagacgatgggatggaaacgaccaccccaacaagtgagtgcggatttcctcacagctatcaccaacccaggcgagcgacaaccacaagttggcatggaaaatgcagtcccccgcaccccagtagagttcgaaagttactggaagaacagccccgagcatgcagagctggagacatcaatgcgacaatacaagatgaagacccctcttgatagctcggaggagatcaaattggatgaaattaagcgccttgagcaatcaaatcatgctcgaatatctagtccctatcttctctcggtgcctatgcaaatcagactatgcattgtgagagcttggcaacgcactcgcaatgatatcccggccttgattgctacggcagtggcgcagacggtggtatccctgatcattgggtctcttttttacaatataccagagaataccgctgggctcggccagagggcatcggtcctttttctcgctgttttgacaaatgctttgatatccttgttggagatcaccactctatatagccaaagattgatcgtggagaaacaagctgcctatgcctttgtgcaccctttcacggaagccattgcagaagttattgtggatttccctatcaaacttttccgatgcctcttatctgctatcatcgtatattttcttgcaaatctccggagagaggcctctcatttctttatctacattatgttccagctcacagcagttatgacaatggccacgatatttcgcactttggctaccgttaccaggactatcggacaagctatggctttggctggagtcgtgattatctgcattgctgtgtacactgggtttaccgttcctcagttcgatatgccgccatggtttggatggatccgatggctcaatccgatattttacactttcgaaggcattgtctccaatgagttccacggtcgccattttgagtgtgtggaatatattccaagcttaagtttcgagcagggactatcattcacctgctcatatgtgggatccattgcgggggagcggtatgtctctggggatgcatatattgcaggcagttacgattactcctacgatcatgtgtggaggaattatggcatcttggttgcttttcttgtcttcttctatgtgctttacttttggctcacggagttgatcccaggaaccacaccggcccacgaagtcttgatctttcgccatgggggtgtgctccaaaggttggttcgaggtgatctggaacgcggagagtctatacgtttgcaggaggtaaaatcattggcctctgaggtccattcatcaaaagcagaacaaaagaataccttcagctggaaaggactctcttacgacattccagtcaaaggtggtgaaaaacggcttctggatgatgttagtggttgggtcaaacctggatcactcacggcactcatggtatgcattatttccctcttctgaatccatgacttccacctcacaggcattgacatgaatatagggcgtttcgggtgctgggaaaacaacacttatgaacgttttagcgcggcgtatgactatcggagttgttacaggagatatgtttgtcaacggccgcgaacttgatgctagctttgcccgaaatattggctatgtccagcagcaagatcttcatgtggagacgtgtaccatccgtgaggcccttcgattcagcgcagcactacgccaaccccaatctgtgtcaatggaggaaaaatataattttgttgaggaggtgattcagttgctgggaatgcagaatttcgcagaagcagttattggaagtcccggtgatggcttaaacatggaacaaaggaaactgctcagcattggagttgagcttgctgccaagcctcaactattgatctttcttgacgagcctaccagtggtttggattcacgaagttcgtgggctatctgcgcgttcatgaggaaacttgcggaccatggccagcctgtcctcgccacaatccaccaaccaagtgccgttttattcgagcaatttgatcgtttgctgtttcttgccaaaggcggaagaactgtttattttggagatatcggtaaacaggctcggacggttctagaatatctcgaggataaaggagctcgtcactgtggcccaactgaaaatgtgagttcttcggctcctgacatacttgaaatttgctgatgccatctcttctagcccgctgaatacatgctcgaggtcattggagggggcacccaagggcagtctacgtccatcgactgggttcaggcatggaaaaggagcactgaatacaacaaacttcttggggagctcgacattctcgcctcatcaccatccaacggtgtgtctgctgacccctacatggtcggcgaatttgcaatgcctcttttagttcaattctaccatgtcatgaaacgcgaccttcaacaatattatcgccaacccgaatatattttggctaagtttggcgcgggtgttttttgcggtgtttttatcggcttctccttctggaagtctgataattcaagccaaggctttcagaacgttctgttcagtttgttcctcttgtgcacaatattctccacgctcgtcaaccagtatgcctttgccccaagcttgatgctaacatctgacgatactgactgcaagcagaatcatgccgaagtttctctctcgacgaacgctatatgagctacgagagagaccagctagaacttactcatggaaggtgtttattctgtgtcagatcctcgttgaactaccgtggcaaaccttgttggggatatgtacctgggcctcattttacttttcggtttacggcagcggccaaagctcccagcggcaggggctagttcttctgttcaccgtacagttcttcatatttgcatcaacctttgcccaacttgtagttgctgcagtccccagtgtggttctagggagcatgctggctacattcacatttctcctgtgcctcttgttcaacggcaccatgcagccacctagcgcattgccgcggttctggatttttatgaatcgtgtttcgcctctcacctattacgtgggtggcatcagtgccactgcattgcatggtcgtccgatccactgctctaatcgagagctgagagtctttgacccaccacaggggcagaattgcggtcaatatctggcggaatatctcaaaacagcacaaggaacgctctccaacccgctttctaccgatcagtgtcaatattgcccacttcgggtagcagatcagtatcttgctgcccgggatatctcctgggatgaccgatggagaaactttggaattttctgggtgtatatcatcttcaacgtcattggtgctgttttactctattatctgtttcgagttctaccctatataaggaggaaccgcacccagaaatctcgaaactgaccttctgatatcggtactccactttcctcttcaccactcttctcacccaactttcatttgttttcatttttctctcgatccttttgtcgtttttctattttctcttataatatctttgtgtgaaaattccagtttaatgccgtctcacttggatgtttgttcagttaggaagtcaagggtgccgtacttcttggcacggggacgacgggagttacgtaatgggcggataaaccaataatccgcctcgctgtagctactggatgagcagtgcgtaaacaagaagcgcctggtatagataccgaataagaagacacttcgtttatacgaaggcgacggaaaatcgtcgcagcgcataacaaaaaccagtatctctgtttaaggcccggcgggggccatatcccagtctgaaattgttcatcgcatatttacatgtatcgggacattcaggttttctgtattttcaattcccagagataccaaatacaagatgtacccacacatgtatttaatcgggacgggacgatcctttcttggcgttttggtatcccggtacattctatacatacgcgaactgatgcagattacaattattcaactgtctctatcttgcaggatatgcaaggcttgatcgtcagtatcctccacaaatatgtctataggtagtcgctattggatgtgactgtgatactagtgacgttacttcagcattacatcggcagctatcgttacaaatggaggtaaatactagaggcgggatgggatgcaaggagagattaggttaaaataattcttaaaattgtaatgcttatctggtatacaggtaaaacggaatcagtcactgcctatctcatgcaatggagtcctgtgcgatctgccaccgaaccacagcgccagcctctctctgcaagggctaacagtgcattgtgacacatatttcgttagtatgctaagcggaaaatatttctatgttgtagagtatgcgctcatgttgggggagctgacatacagctactggcccaagcctgcgtctgcaatgcgcaatgcgcaatgttttactcgttaccaagctagggttatgaacccgcattatattttacaaccttttcatatatacaatctccgagtgtatcatgagtaggtagcatggttatcagtcttctgtgcatttaaatttatgaccaaagctagttcttctcccattccaagtgttctttcacaatggctgtcgacaagttaccattattggccaagttggaacctgtgagcctgatcggcttggtccttctatcggggctattttttttattgacagcaacacgaaagtccgacctccctcttgtgaacggaaagcgaccctttgagtttggaattgccaaagcccgccaacgatatctgaagaacgcccatagcctaattacggctggtctagagaaggtatgtgattcaattctcatctgggtacataattggggttactaatgcgtaggtctaggctggtgcatttcggatcgtgacagaaaatggcactagaactatcttgtcgcctaaatatgctgatgatattcgaagccaccgtgatctgagcttgagtgctgctttagttaaggaacatcacgtcaatatcgcagggttcgacgcagtcaaggtcactgtgacatctgatatcattcaagacactgtccgaacgaagctcactcagaatctctgtacgacatggaaattcttcattggcaataagagttgctaatacaaacagtgaatattacggagcccatgtcagaggaagctactattttgttgaaggcacagtggacggacagtaccggtaaatgcttctggatatgatatcaatcagacacaactgacttatttcattagagtggcatgatgttgcgctcagacccaagactctaggcatagtcgcccagctatcctctagagtatttttgggtgacaaagtttgccgtaatcccgactggctacgtctcactgtcaactacactattgactctttgatggctgctgctgaacttcgactctggcctgagatgttgcgcccaatcgcggctaagtttttacctaaatgcaagaagattcgcaagcagcttgaggaggcccgcaacatcattcaacctgttattgacgagcgtcgactggcccagcaggcggcaattaagcaggggaagccccaggagcgctaccatgatgcgatccagtggctcgcagagaataccaaagaccgcactttcgaacctgccgcaatgcaattggcactctcaactgcagctatccacacaacgactgacctgcttacgcagactatccttgatctttgtggacgagaagaacttgtccaagaactgcgggaagagattatttccgtgttcaaagatggcagttgggataagaccacaatgtacaagctcaaactgatggacagtgtgatcaaggagtctcagcgagtcaagcccatggcgatcggtaaggaactattcatctcattttaaaacagcccaggctaaccaacgatggtgaatagctaaaatggcacgttgcgccgaggaggatgtcaagctttccgacgggactattatcccgaggggtgagataattcttgtttcctgcagtaaaatgtgggacgcgaatgtgtaccccgatcccaacacttttgatccccatcgattcctgaagctacgccaacagggctcagaccaagagagctttgctcaactggtttctccctcccccgagcatatgggattcggctttggaaaacacgcttgccctggaagattcttcgctgccgccgagctcaaagtcgctttatgtcatatcatcatgaagtacgactttaaggtggcagagggatgtaacccacaggtgttgaaatctggtatgagacttgcggcggacccatttgccagaattgctattagaagaaggcaagaagagatctctttctgagctcttcccaatttccagctctggccgtagttggctacgagttccggtcttttgacacttgatctagcccattattcaacatgcatgtgtattttttcctgcaaactccatgtttcttactttatcaacggagccaaagtccacaaataatagactgaataacagaataaatctaaattaccagattgtactttgcatgaccggaccttgtggagatggtgagtgaataatagcttttctcggagattaaacacaattttcaggatctgctttagtattttaatcataaatactttattcaggggatatagatgaaaatgatatatatcaagttacaaacatagatggagctgccagccagtggctgacaaatacgacatgctggttgttcttatccagtccgtctacatatatcccatagttactagtctgccatttagcatagcatattaatcacctatcaatctcctcctacctatttacggactatgaaataggctgaactaccggacctgtgtgctaggggttacgaatcttggattgagaaagacgagctcgtactatgggtaaatcattaaatattatcctatcgaagagctcaacggctagatgacaatgaatgagatagaagcccgaattgccgcagcctgatcaagggagcccattactcctgagcgcgcttccattctgcgtcaaggttgttgccaattgcgttaatggcctcctcctcgagctcacggtgagagagtccggtacgcttggagaccttagattccgactcttcacgcgacatttccactatgatcgaacattgtcagtcatctatctagtatctaagaatgtgaggaagcataccgtgtaaataaacagcggctttcttgccagtgtacattgcatgcgggacattggtgctcccatcgctgttcgcatcgcctatggcaaagacaccagactcgctggtacgcatcgcgctagtaacattgatcttattatcaaccaaggtcaggtgcatcttggctggaagtgtcgaagtctggacagttgggaagttgacaatcaatgcattccgctcgacaggctcgccggtagtgaagtgaaggcgaaacttgtcaaactgctcaccgtcctcgcccctgccatcgccgccatcctgcaggcgctcaatggaagagattgtgcggttgtcgatggtagtgttccaagcggcaagttgttccttccagtcttcgacctttgccgttgcccgggcttcgccatccgcggtctgcgagccgttcacaaacgcgatgatatcgctatacagagtgtgggtttccaacacattacccagcatatcggtgatatcaccgatcattccaaagggctggtccctgtgctcgtagccatcgcaccacggacaccagaagataccgtgaccccatcccgcctgaaggccaggagtcgcgggtagaacgtcacggacaccggtaccgagcacaattttacgggcagtgtagttcttgtctttggtggtcactgtaaaggcagagaaatccccctgtgggaaaggaacgatggaatccacggtttcattggtaaagtgagcagttggatacttctcgatctgcgcgcgagctagacctctgaaagtagcagggggtgtacctgaggggaatgagatattaggtaccaaacattgtgttggcatagaattagggcgcaatctcaccatcgtttccaatgacatcgtgcatttccctggtcggggcattgcggtactcctggctatcaatcaagagagctgttcggcggacacgagagacaccgctgagtgcactcagacccgcaggaccaccgccgaccacgatgacatcgtaatcggtcttaggcacttccacagcagtggcacatgccaccaaggagacaaaagcggacgcgaatgttgctttgatgaggaccatggtgaaatatacgcgactgatgagctatcctaagaccgcacggcagcagcaggaaggccatttataggcgtcccaattttacccacaatgttttatggcccaaacatgtacacatctgtggggacactagtcgacttcgtgcatcttggattgaggtggctgaagctgaagagatcgtcgggatcaacaagatcgtcagggattcacaaagatcttgttcccttgtgtatatgatcgctgatcccaagctggctgtatggcgagaaaataatactaactggcaatttacggaaggaatgtgctgtagagaagaactgtagacctcctccgtatgcttggtagacttagggcataaccttgccaatactcgatgagcactagcgctattagctgcgggcgctagtgtatcaaccggcgatctcattggcttggcgggtccgctagttcttggcggcatcggccctgaatatggacttccctcgacttccctcggcacttgaagaagtgacccttgctttctacctttcattcgaaactctagagacaagcttgggattacatttagaatgcgttatattacagataattttgataagtagcaggtatgggaggaaatatgcctgtgctacattactttgagtggaatgaacgtgaagggaaatcagttcttgtcaggtatgtagtgttgtaacatcaaccttcgagttcaccacaataactgcgtaggtaaaatatagaggaatggatacaataatgcataattgagcttggccactacttaggcctaggccttataaatccatgtccgatttcacaaaatttaacaagcctgcaaatggaatgaggcaataaactaattttcgagtccaatatttttgctgctgggattgacgaaacatcgaataaccaacccgttggcccttgcatttcagaaggaagcagcaacaggatgtaagggtacaatgcttacaatgcttgcaggtgcattggtgggaggtcgagtaaacacagcacattggtgtacttctaattctcaattttaggatactcggaaattcacaacatatcaagctttatgaacttaacggccatccgtggatatcagtgatggcaagaagtcacgagtaggatgaatagtagaatatgcaaaatgggatatcacaaaaagcagaaatctcccggtctataagcaccgatgccaaacgcctcaatctatctaacagagtaaactagctttccacatctccagttctgacatcataattaaacatcttcctggtcgtcaagtaacaataccttcagcttctccaatttatcttcacagtgcacttccatctgcatcaccacgtcaacggcatcctttctggtgataagcagctgcgataccagccaaaaattatacccattcctatagaaccccattgacgcccattcggcacttgttattctattacgcagtgcgatccagtaatcacgccagcgggatagagcagtccggatagcaacgaggatggaatcttcaggaatagtggtgacaccgacgcttttcccgcgattcttgaagtggcccctgcatataaaagaaccgagaaatgtcatgtgggtgttaataaatgagaataaaactaaacagggagtcagccagtgcaagcaacaagaataaagctctctgagacaaggacatactatgaatcaagataaacatgtctaaagcagtgaggtccattgggttagattcgggtgcctcgtcaaacaggttcttaaatgcctccgaaagcgtaaagccgcgtgaaaagcgaaagtttgtctccgcgaacgggtgctcggagaagaaaagcaattcatcacagggcagatcgcattccatttcagtgtgtgtcaggcgacacgggtagttttgaaaaaagaagaaggcgcaatcgagcagcgaaatcatagaaatagtcctgtcgaaattagtaaggcggacatgaaaagataatactggaagataagcacctaatccgacactccttttggatccacaagtgctccaggacctggtcatcaggaaggtgacgggatttgacaagtccaattcgtcgagcaaccttaacaacctcaccgaatcgattctccattgcgcggtttcgagataaacggttccccgcccagtattggacaatggtgatgataaacccggcctgaaaattctggaaccattcccaatcactgttttcctcatcgtagcaccggccacccgagagcatggctctgatttcggtctccgccgagaatacatcattcgcaaagatgaatagctctgcaagatccagcactctcttagcgatgtatacctccctctggtcactactgtacatcgcgcccataaagactaccgcggctaagagcggcaggggaactgtctccgggtcgaaggatataggaagcattgcacagctaggctgccagtatttgaaatagagcatgatgtattttcgtatgcgcgtggtggtcagtagaaaattgagattcgcagatagttcctcctgcgctttagcatcaagcgggatctgccatgcttgtgtcaatattaaatgaattaatgtcgtcgcgaacggtcgctccggttcgaagataggtggatctccgggaaatgtagtgggatgctgccctggacggatggcggatcggtagttcagttcaccagtatgataggaattttccgtgggcttctgtccatcaccaaaagggccgtggaaaaagtccaggaatgtatcttggaagaactgcggcgcgacagggtcgcaatcgatgaatccagagccgtattccgaccgagcggtatcgatgttatatggaagccctatgccctgcaattcctctaggccatttgtattatgataattgagactgcgtgtacgatcactgtgtgggggaagccggaagttttccgtgaagctgtcggtgccaccattaagtaagaacttgatcgatcctcggtcggatgatggctcttcacagatttcgggtttctccggtatttctgtgtgatttgcatgagtcttccattataaccgaatttatcaaggcttgttgtacctttttcaatccctagacggctcgagccagccgtccgctcgttgttgcatatcaagtttctcttctgacacgatccgcaaggacttcggccatcgcatcgcagtttcatcgaggtacactattcgagcagaataaagttagtacatatgactgggtttcataacgtctagttgcgactaaccgattgacaagcatgtcgccgtctacccctctgacctgtctctggaatttcacgatccccgcgcctggcgcagtcggtataatggacgcgcagattgtcactaattccaagtgttagattgccgagttgccattatagattgtctcggcttgtctaaccagcgcgcgaacgaatcattgcaaaatacgcaggaatagggtttctggccggagtctgtggaggttcagtatgttggatagctgcagtacggggcatacatacggcgcaaatgatggcgtttgaggtgatcaattcgcgtgaacgcacgctgacaaacgtcacagcggaagtgcttgtctgtcggcttcatggtggaccaccggggaggaggggaatatccggggtaaagaagagagaacgaggctgcacgggaaagggtgaggtatcggtattacattgatgtctggagataagaggtatcctttgagccttgataacgctaatagatacttgataatattaccggtcgagtatggtatggtcagctcctgatcttcatagcaaataattcttattctacctcatgttagcattctgatccaaatcactccgtaaatattcttatttgcatgaatagttttgatatataagatcatgaagcccaagcccgtccaatcgtggatgaaaccaaagtatcagaagagataggggtagataggtattgtttatcgtcttgacaaatgccctccatcacgtacaacataggcgctgtttgatgatagcagatgctttctgaaggcatcttttttgatgcctttttgatgttctttctgattactttcctatatggcaactagagcaaaaacaatagaaacacgacaagggcaatcttgtcatgatcgtatgtgatgctacaagggatataaaattgaacaccttttgttgagaattcataataggctaaataataaatcattctagagactagaactagccgtgagcgctaagagaaagctgctacgataggaaaggaaggacccaaagaaatatatagcaacaaccttgaatcatttacggtgatttatttcaggacacaaatacggaggagtcctccgagtcttggccttgatcatatcgtagcagtctctccacctcacaatagaacggctagccctattacagacgacctagatcaccttgtatcggattcaggaattatgcatgaaatacattaaattttgtagagtgcttggggtactttgttccgtatgatacttttgatttgagatcctcaagtcatgaatatttcgatcgtataagtcatgccccttcatgtttcagattctttcatcagtcaaagtcaaattttgaaaaaaacctgtcaggctcaagtctttgaggtgtagaaatatcttttaatggaacaaagaggcctgagtgtcccgaggggtgcgtgacagcatgcatgctagccttctaaggttgactttcctccccgttagcatggaagttctcaagaccgtcaatatttatgagagggaaacattcatatttgatagattatactgcaccttcaatagtgagatcaccctttgcatgtaggcagttgatgtacataccaacttactacccactttgagactcttcctatcaaaagactgtggagtgtgttcagcccaaatgattctcaatatatactacgtacgcatccccgtccgagaccgggctttgaatttgagtttctttgtcttctaacctagtccttctcaccctcgtccccgtcatcttctcatactgtaaaaattccgaatcactagcttccaccgtacatattgtggtgacagatcaccaacccccccccctgtacaatgtttgtgagccagctggcctggccactgatgctagctttggggaccatgacagtggctacagaagcatcgacggcaacttcaacctcctcctcgaccggtgtcgcgacccatacgattcaggtgggacctaagtcaaatccacatcaatttgttccaaccaacataacggccaacgtggatgacattgtcatctttgaattttacccaacaaaccattctgtcgtaaaggcagattatctcgctccttgtgtaccagcaagcggaaatgtcttttattcgggagccttcgtaaatttcaacgagaacgatggacaacttgttgggccagtgagcataataaattggaattgcatgtttaaagcagtgtggctaatatatgcaatgtagcctccgacttggtccttacgagtcaatgatactcaggtacagtatctagaccaaacatatgcccacaaccttggacggagactaacaatggctccatgtagcccacttttttctattgcactgcaatagattcatgcatcaagaatggaatggtcggagtgatcaacgcggtatgactcttggtttcttccgagcatggattcaggctgactatatcaaacctacagaacacaacccagtcatgggaaacacaacccagtcatgggaaacacaacacgaaatagccctgacgtacccttatatgctagtgccaggccagtccatgcccgcagaaggcgacggtagcagttccagcagcgacaatagctcttcttctggcggtaagcatgggcttagcacgggggctattgcaggtatttctgttgccggtgtggtcttcgtgagcatattggtggcactgttcttcgttttaggccgcaaccgcgtatactcgcagtgggtatcctcggaggatggacgcacggaaagaaccgcacgctgggcactgttcaaccacggcgagctatacaacaacgggaaaagcgaagcggggagtagtgtcccaactaacaacctagcccctgtcgatataaccgccgtctctagtcctgatcccaatgtgtgcacattgtcacctcgggcacgagttacctccggtcccggttccctacctatgcagcagggacattggagctggaatgagcctcctccgcgtgcccgtgcaagcgcgatggccacagagctagagggccatccaattatctgggaggcaccaggcagtactccggagtatcggtggtgaacaggttgaagcgagcctcgtggagtcttgtaataagcgagggttatggtgttggcttcaattatttccctttcatgcgcaaatgggtctctgcctttcttatatgttatatcaatacctgtgatttattgcttgtaatatataattccttttgaaggcgtcatttaccgtctttgtggataacgatatttaccagagtcctatctacagtttacttagtgtctgtgttttgtcgacatgactcatctgcacgtggtcggcgagtgatttctgcatgaacattatatgaaggttagatcgtgagggttgcgtctccatgtagtataggttcagtggaaggaatatcgagatgcgctaaatagacgataatcgtaataaaaccgaccataacacagttccgaccgcgttaaaggccttagagcgcgtaacatacgtatcgagttcgatcgagattacggtattattggttagccgacttcccacgcgtcgaaaatttatctcccaagtggattgcaccttcataaaccatcatgtccacaccatcaagacgttcagctttgggaatctcggggacccagaagcaagctcttcgtatttgggcacaaagtcaaaaccctcgtccatcacaatcgcaatgttctgcttggttcgaacgaacctatggacggaacctctcccaatcgaccatctcaacaatcctctctaaaaagtttgatcacctcgatgctggtccagcatctaccttaagacgtcaattggcaccgcaatggcctctcttagagacaccactttgtgagtggcttgcgagccaagaagcgggcctaatgccgccggccgatactattattgctaaagcacgcgaaatctggaatcaaattccggaataccagaccctggcacttcctcactttagtaatgggtggttgaacagattcaagaaacgatatgctgctcaacttcatgatcgccaagatggcgtgccctcacccacaccccaaaatggtcgcaaagaaacgagagcactgaaaacgctatgtggtgaattcccggaagatgatatttacaacatggatgagaccggacttttctggcgaaagcctccatttggcgcttcccccgctcagaaccaattgacaacaaacagggaaaattcccgcatctgcattatgctctgtacaaacagcactgggtcagatcggttacccctttgggtcatcggacatacgcctatgccagaggcacttcaaagggcgaatctcaaagccatggactgccattggcgatatcatcgacaggcttggctaacgcagtcgatcatgcaagaatggctgctctttttttacgacaatataggagagcgcagagttttgcttctactggataatcatccagaccaccaagcagccgtcgaggctactccgccgcctccgaatgtgcatattcaactgtttcctactcaaactcgcacctcggatgagcaacagccgatcaacttgggaatttcccagactcttaaacattactatcgcaggcaatggcttgcgtacattgtggcgggtagagaattgccccaaaacccggtccacatgatgagtctttatcacactatatcctgggccacccggagctggcgtcacgatgtcgcgaacgcaattatttacagggccttccggaggagcagtctaatggacccgcagattgagtttatcactgccccaaaatcacccgatttgacaagtctttatgggaccgccacgcgaaacaatcctgacggtcgaacggttatcagcctcgaaaactttattcaccccgtggatgaggattttgagggcggattaaacgttgccggatttgtcgttgagggtgaacctaccttgcaggaactagatgacgccatcgtgtccatcccgccggagcaacttgtacctcctgctgtggatgcagtcattgggatacagacggccatccggtacttggtacatcagccttggatcactgcgatggaccttcagggtctcgagaggatagagagaatgatcaatcgtctcgctattgaggagcgacgacaagcacacgttggtggtttcgattgaagaagcgactaaggacggtgacagtcgtcctggcagttagtgccttcatctcgacaattaatcaacctgagctatgaaatcgtgggttttttcttactcgggtgaaagctctcagaggaaggaaagttacatctcatatatgtcctgtgcgttatgaacatattgcagagcctggtacaggccgagctccacacagttgacctttatgagtgcccaatatctgtagttaatagcagggctacgtaatttcaagcgcagcaccagaactgatgttagagaataatagctcactaccaccgggcttacccagggtctagtgtaccatctcatacattgatattccgaacaaaggacacctgattcatccaccggactccacgctcgagccttattcgagaattagaaggtaatattatcagcctgcagcattgactggctcgtttttttaaattgttggaatatattatgctgtcttaagatataatggatgtccaaagctcccgtatcaagacctaaaccgtccttgggatgcagaataccaatcaattcttgaggtttttctattttaagctcactccaatgattatatgaatatcagatttcaagttttctgagccgaaatagaagcatatcaactccagatacactgttgtgtctatttggctctttgtttattccacactttctatttaaagcaaaggaggatccgttatgttgttgattttggcctagggtcgatccgtcaatctcgcgttcttggatccgtcggcgctttttgcaggattctctcaagttcacgagtgtccaggagttcataatatcaaagatgagcaggtcaactggaaatgatccccccagggtctccatcaaggcaatcaaagcacaaatcaggcattgcatccagtcgttgaaagaccttacagtaagttatcttgggaggaaagtgtcaagcaaggcagactgctgacttttgatagcattccataatgcgaggccgcggcgatgatactcatgggttcacgatgctatggcccagaaagagcggttccgatgtcgatgtcgatgtcacgatcggttgcgtggacgccggatcctacaaacaactttcgaaggcggccaaatgtgccaaagaaaagagggtcgtaggggggatcaatgaaaatgataggtgaattgttgggagtggaatgatagggcagcccgaaggcgcacagtggtgactaagagcttgcaaagagaaattgaagacgtgacagggacatcgtcgctgtctgtcattttgaagagtaaccaagtgggagccggaccaacatggtgctttgatactttcgggttattgactagaaggttgcgaccattaggtccgtactcgccaaggaaatatgatgtgatagacattatcatttacctttcggtgcccaatgtaccagaaaaaggccaacaagagaaacctacctacatgcagtgaagtaatttggagtcggacctaatagctgagggttgatgtttggctcttcgattggtcgggttcaatcacagattggcgcgcggctgctcacaacacctgataggttggaattgtgtgacggaggatgatgtgcaggagtataccagggtgtagatagaaaacaagtgtccaacacatgaatcgccgaagggaatcgaattgaacaagaaagaaagtactattcaaaatgatatcatatataaaacaggctccgtaacggggaatcgcttttgtgtttcagatagggtccgagaccaaaaaaaaagaaaaccaaaggaaatattttactctacagcatcagtgatacagcccaggctggcgtcctggacgtttctggcatatttacccagagtaccacgcatggtaagaccggtctcagggaggtttccagcagccttgcgggcttcccacttctctttgcggtcagcaaactcagcatcggagagttcaacatcaagaaggcgcttgttggcatcgatggtgatgatgtcaccatcatttacaagaccgatgggaccaccgacggcagcctcggggacaatgtgaccgatcaagaaaccgtgagaaccaccggagaaacgaccgtcagtgatgagagcacaggagtttccaagaccatagcccatgagggcactagagggcttgagcatttctataagaatgttagcattatagtcggagatcaggtagatttgttgcacataccaggcattccagggccacccttaggaccgcagtagcgaatgacaacaacggtcttctcctccttcttgatttccccacgctccagagcggcgatgaagtcatcttcactatcgaacacccgggcctttcctgtgaaggacatgccctccttgccggtgatcttgccgacactaccaccgggggcgagagagccacggagaatctgaatgtgaccggtcttcttgatagggttggagaacgggcggatgatcttctggtcctcggggaagccagggagcttctccaggttctgggccatggtctcaccagtaacggtcataccagagccatcaataagaccctccttgaggagcagcttcaggagtgctggggtaccaccaacggcgaagagatcggccatgacgtacttgccagagggcttgagatcagccaggaagggaatgcggtcggacacagtctggaagtcatcaatggtgagcttgatgccgaccgagtcagcaatggcaatcaagtgcagcacagcgttggtagatccacccgtgatattgacaacaaccatggcgttctcaaaggcctgacgggtaagaatatcgcgagggcgaatgtcctcggcgagcagcttcttgatggcaccaccagcggcgagacactcaagatacttggcctgggagttggccgggttggaggatgaaccaggaagggtcatacccatggtctcaatagcggaagccatggtgttggcagtgtacataccaccacaagctccctcgccggggcaggcgtggcggatgacgtcaaagcgctggggctcggtgatctccttggtaaggaactgaccgtaggcttggaaagcagacacaatatcgatatcggcgttgttctgggtagcagcgcagccgggcttgatggttccaccgtaaaccatcaaactggggcggttgatacggcccatagccattagaacaccgggcatgttcttgtcacatccgggaatactgatattggcatcgtaccactgtccacccatcacggtctcaacggaatcggcaataaggtcacgactctgcaaagagtaacgcattccagaggtacccatactgattgcatcactgacaccgacagtgttgaattggaaaccaatcaagtcctgatcctggacaccctggcgaaccttgttgctcagatcgagcaaatgcatgttgcaagggttgccgttgaaccacactgacgaaattccgacctgggccttgttcatgtcctcctccttcaacccgactgcgtacagcattgcctgggaagcaccctgtgccttgggttgggtgatggtgctagagaccttgttgaggggtttatcattctggaaacgagggagagtggttgagagagaccgactaagaagagaaaagaagtcagtaaccggattgacgcgacacaattgaaccaacttacacagggttagacctggacaggctccgaagagcggcgggcacacgggcccgagtctgaggaagcatgacgaggatggatgagagtatccaaaaaccaccagatagagcgatacaatcggaagtctggagaagagagggggacaagaaataaaaagcggaagctcaagggagtgggtcggtcaatcggttcgacaatcaaatcggagagaggcgaaccctccccgccaattggatacgcgtcgttgtcagcccgttactaggggaatgcgcacatcaattgatatttattcgctatattaatgaacgagggaatgaaagaacaatataattaaaaaagaagcgacaggaatgggaagggaagaaaatggagagaggagagaagacggaggtttaagacacatgggcggcgtcgacggtgtggtgactccgagagtactactatcagatagaaaacctcatcaataaacgacaaaatatgtccagattctattctcatttactgcgcgaagagtgcctagtagcttctaggtaaaccgagtaccttctcgctcacataattcaagatcatctcccgactcacaggtgcgatacgaggcacgaaacaatcgcgcatatatcgttcgacatcgtactcaaccgcatatcccataccaccatgcgccagaactgcccgctcacacgccgtgaaagcagcctctgcagccaaatacttggcactgttacacgcgacaccaatttcatggaaaggcactgatccatcgttggtatcatagagacgtgctgcgtggtaggtagccagctttgccgcctccagtttcatgaaagcatcagccaatggatgcgccacaccctggttctgaccaattggccgtccaaagacaacacggtccttagcgtactccgaggctttttcaagggcggcatatccaagaccaagtgcttcaccggccaaaagacatctctctgcattcatgccgtggaggataatcttgaagccttggttctcctcgccaattaatgtatttgcaggaatcttataattatcaaagaagacctcgttggcatccacagcgcgtccacccatcttcttgatcttgcgcagatccaagccagggctatcacggtctagatcgatacaaaataaggagagaccctcgctggtcttcttaacttcttcgagaggtgtagttcgggcgagaaggatcatctttgaagccacttgcgcacaggtaatccagatcttctggccggtgaccgaatatccgtcagcggttttgctagccaaggttgtgagtttgagggtctcaaggccagtgtttggctcggtgacaccaaagcatgtgcgccatgtgccgttgataatattcgggatggttgtctctagttgttccttggtgccaaacttggccaatggctgtgtcgcatagacgttggcgtgaatggcctgagcaccagccatacctgcgccagactgtgtgatagtctgcatcatcattgtggcctcggagatacctgaacaaggtcagaaatctggatgagaataagaaatctgcgcaactgtacctagaccagcgcctccgagggattcgggcaaagcaatgccaagccatccatctttagccaatgctgcatggaattcctttggatctttctcttgttgatcacgctcctgccaatatgtatttgggaatttggaacaaatatgggagatcgcttcgcggactgtaagctgctcttccgtaaagccagtcatccccataatgtcgcgccgccctgaagtggaaaatgccgcgcgaccttgggggtatttgcctattcgacatagtcctcgcaaaagtgcaggcacttgcgaccgtagcgcgcgttgaaattgtagatacattttacgttgaaccttgggaggagcttctcggctcaaaacataccccgttcgcatatagccgactagcagtcttggcgttctcggcttcgattgaaagtcgacggggtttcttttgcacatattcgtgtcctattgacatgttgctatcaaacatggccaaaattcaagtagccgagccgaattactcgaaaagacagctgcatagaagaccagcgaaactaccattgagcgacaggctggactgaagtctcatctgcgaaagctactccgtacacgattagcgaaatgctcaaggagaagtgaatatcctcaacaacacttgagaatacgatgaaatcttcagaacttaaatatattcgtgctttgagagaagttaagcacagtagcattcatcgttcagccacgtcctgttcagccactctatcgcttgcatccggactctgctctttcaacaattcgaactttcgaacgacttgaagagtagcataataactgaacggtaaagctatgaaccacagaccgaggttgatactcgccgttgcgatcaacgctgttggtacagcctgcacgccaaatccgactgcaacggcagcagtttcgatcccccgaagcaatgagctgtatcgaatttgatcacctggtgagtccgacaaatttccgatacaccagtaaatataattctcaaccaagccaagactgatgcgctcaaacagatacaggccaaacccacgaccgaaggtgcgttgatcactccagtccaacacggggtgggtgtgtcggtactcgttctggataatgaccgcccagatccatgtcgcagtgttcatgagtgcaataacgatgaacgtgacaatcgctctatgcttccgatttttcatccaaggcaggtccaccaatgagccacctaaccaagtcgccatcgttcccacaaccgccgacatgaagcctccgagcgcacgcgcgcggactgtgaaataggtcgcgagatatgtgccagggtatgcttggatccaaccaaaataccagaataatgggacaaggagcaagatcgacttactccttgccagccgccacatcgcactgagctcttcacgccagtggatgccgcggggggcctcgatacgcgttccatcatctctttgcactttctcgggatttgacaagagagggccaatgaccagtccaagacactggatggcgataaaagcgagatacgtctggtacccaacctggccgcgtttatcgacggtgtggtttatgcctaaagagaccgcaccaccaatgatgttgccgaaattgcggaacgtgaaccacgttgcaatgtagcgaccacgtttgtgatgctcagggtatcctgtggcgacagcaccctcaacgctccaaaagaaacccgcgctgatgccgcaagtgacacagccgagatacacaagccatgttgcaccagtgcgattgttcaaatacaatcccgctgcgtacaatggatatccaagtgaccccagagtcagggtccagcgaaagccgatagcgtttgtgatgaatggaccggcgaaacaggtcaatgtcatgaaggcgaatagtaaggcgttggccgcgttgaccaggtctgggctctgggatccgcccacgcccaaaccattcattgcagtccatatacctggcgcgcagaatgcacataatcctacgaccaggatttgaaaaagtgtactgtaaaagaacttgggacgaggtggtgggtgttcatcttgactttccacggtcgttgacacattggctttgtcttcggaatgtactgatgcagacatgattacagcctgggattgcagctgagtaaatcactgcaaatatgatccctgtcatacacagggcctagtaagtccattttatatgatagactcattgtatagcccgtttattggcacgatgcctagataagcacgcaaaatcataggcgcatggcataaccacaatcccgctcggcaattgacgatgaggacataagagcttgaaaggtgtcttctatcacgaatcatgtcaaggctaccccataatattccgctatcttggcagttgtgaggggtcgggctctcgactacaaatgcatggcatgcgcttggctgggtagctcaatctacgatattattttttacgtttgcaaaaaaaatggccacaactacagaagaactgcagattgagaaacttcagttggaggactctatcgtcacattcgagtccttcgacctcccagcttccaaccaacgtatcctcggacaaccacatcccaagaacacagttatcccgcttgcgctgcgacctgccaagtccgacgccaaggcaactctcgacgatttgatagagacagtcaagactctccaagaaaaagacggcatattgaccaagaagctcgcaagacatggcacgctgctgtttcgcaatctaccaatccacaacgcagaagacttcagcaaattcgcgcacgccttcggctataaaccccatgagattattggtattgtagtcgacagaccagttcttgcgccaaatgttgcgcctgccaatgaagcgcccaaggaggtcctgatatacaaccataacgagtcgccgcaagtcccacatgcgcccgagtatatctttttctacggacatcatgagccgtcgaaaggcggggaatcaccgatatcttcttcgttggaattattcaatcgcgcacagcaagagatccccgaattcatcgctgaactggcggaaaaaggaattctaagtaaagtgacataccgagtggagaagcagtacgaaggtggatccacactgaagcaggcctttggcaaggaagtccaagatcatgacgacgaagagacaaaacgacgcaaaatcgaggctcagatcgcgcgctatggcagagggcagcatactacgtgggactggactgatgacggtcttatcttgacgcatcggctacctgtcatccgaacacagcccggtacaaacctaccaactctctttaccgggttggcagcatattggaaacgtacacagttcgatgccgaggcgcgaaaaaacgtcacacagcagctctttggagatgggacacctattcctgaaaaatatcttgcacacctggcgaagatcacggatgagattcgggttctccatcgctggcagaaaggtgatgttttggtttatgataacgtcattgcacaacatggtagagaaccgtggcaaggcgagcagtctgatcgagtgattatggccagtttattcgatggtgaaagcgtgccgggcgcttatggatttggggattgggcgcaggttgtgcaagcacttgattgaaacccattttttttatgacaacacacacttcttactcaacatacttctgcttcatcttgactttcctgtcgtaatttactatggtgtccctgtagtaagatatagcttacggggaactaagtataccaccgggcataatcctcttattgccaggtagtattttagattagttgagtacggtgaacattgtatcaagttaccggccatatactatataccaatagtgaatttgaatcgcttacaagtggtaactctatgtacagtcactccgcaaaagtctccgtcaaatgagataagcgcccacttaactctttatagtaccaattcgaatccataggttttaatagattcgacacccttatttaaactagttttagtatttagaatgaatatgcctcagaggggttcttggaaccatgcttgattttgaaaaagcattgatcaggttagcaaacgcggttgcaaacttggtaaaaaagaaaaagatacctaggaaaacgcgcatgtagggctaactgtgacggagacttttgcggtagaactggaactactagaggttatacaaagccacaaccaactgatctgcacgtcttccgtagatccgatgaacctcgctcaacctggggagaggattttccgagtttttctccctcaggaaatccaagactcctggtgtttcaacccagcaaaaacgttggcctcgctgtgtgatccagatggcggcctcgagtggactcccgaattccggcctagcaccattgtgcgatctgttcacgacagcctcaatggcatcctctggtctatcaaccaaagttcgccaccagaagaaatttgtctgatgaatctttttgtatagggcgtcgacttgggcatccagtcttgcgatttcggcagaaagatcggggctgctcataatacgacgattggccttgattgccgagcttcgggggatatttgctaggatttggtccagtacctcctgggggaccttcggcccaacagcttgtcgggcttgatgtagatccttgagatcgagcagaatcttgattttcaacagagtcaaagagagaaggaaagtgatggtgtctgtgaaatccataaacctagtctctatgtccagaaagtaatcaacatcctcaagaatatcggggttctcaataggtgttggtgctatttgcccaggagggtggtcttcagattcctcccagagataccaggacttgatgaatccataaacctcctcatcctcatcgagacgaatccagagagctgaaaccgtaccagccgcgtagtatttatcgggatagtagagcagcgtcagctttcacaatgcaaccgatgctctgatagaactcttcgtgtaagcatactccatgcactcctgcagattataaattgccatgaagtatttgttcttatcaggtgcgaattagctatccgtcaacaggaggggcacattggggagcgaggaatcgtgagggtgaggtcccagccgagcctcgatggcttttactgtcgcttgagtctgtcgaacatagttacagaactctttgtggtcttttcgatgttcgatctggtgatctttactgcaataagatagcaccctacaggcagtgcagattttcaggtcctgttctttatcgcagatcgcacatcccgaaggtaaagacgcctttgattgaacggtgtggaacaggaacttcggctgttggactgtgatcggagcttgcatcgtgtgtactcgaagaatctcacagccctaatggaagggaaaggggaaatggatcaataaaaaaaagcatatttgacagacagaatttggactaaaactggagtctggcagaataaattgacgcctgagttatacggccttaatcaggcagaatcaggtagaagcaggcagccctatatccaatccaaccaaacagtaattccctccagcacatcccggtacttcatgtaataagcctggcccaacatatgaagcttccgccgatcggtcttttttgatctagtacgtgggactctatcaattaggatatacaacccaggaacataatacttcggcaaggtctggcggaccgcgtcgctgagcgattgggtgagcgcatgcacagcgtgtctctcgctgatcggacggaactccatctcttcaactggaccgctttccatgttcatggggttatttgtcaagtataagaatacggcaagaatgggatcgccctggccgtcaatagctccaagaacgtcgacgacagcaaaatcaccggtggataagttccgccggaggacgtactccacttggccagcttcgacccgcgctccgtcgagtttgagcatactatctttccggcccattagctcgatcgtcccatcatggttgtaccgccctagatccccagagcgatataggcggtggcttggcctttcggggtggagccgggccatccagacgggaggcgtggagaggaagttctccgattttccagacacgtggtctagatatcccctagagagatgaggaccctcgatgaggagctcgcccacggctccgacgggcatcagctggtcaggattatcgggattgacgatccaaattgtaccggtagcagggcgaccgactactgacccacgacccatctgaagattgcggttataggcgcagagggaggctacctcacccataccgtattgattcactacctgtacgcggcccagccattttgccagtaccgcgtctgacactggctcaccaccaatacacatcatctccagggtggggacgcggtctggttccatatcgatggcaactgagggtgttatgaacattatgttcccctccaggtcgttcatgtcattcatgagggattccatcgtcagagatttagtaggaacacagcagcatccgccggcaatgagaggcgccaaaaagtcgttgttgctgatatcgaacgtgtatgaatcgaattggaacatccggctatgtggtcccatatccatgactcggatgtaatccgtcaatgccgaagcgtagctacggtgctcctgaatgattcccttcgggcttcctgtgctgccagatgtgaagagtacaacgcaagggtcggtgggcgtgacggtcgaacaagggactgatgtcaccagtggcaaactggaaacggaagcatcgctgacctcgaagagggtttcaatccggtcgccaaatcttcctttatatccttctgaggtgagcatgatctttatctgggtgcgctcgagaacagaggaaaggtatggtggtgggtcactgccatcaacgcagatgtacgcaccaccagccatgagaacagccagtctagccacaatggcccaggtggatttgtagaaggcacaagcgacatagatatttggtccaacgccttgtcccactagccaatgtgctaaccgagaagttaattcctcaagtcggcgatatgtcagatccccatcccaggagcgaactgcgggagcatcaggggttgtcttggcgtgctgtaaacaaagatcatgtaggagggaatcatgcgtagggccgatagctccagtgaatagggtaatctgttcacgatcttggggcgagcataattcaaggctaccgatggtttgtgtagaagagccatcaattgacgagagagcccggttgaagctgtgcaagaggcttgtagccattggcagtccaatatcagtgtttccaacatccaatcgggcatgtaacatatcgtcggaggtatggtgtatggaaagctggagaccggggaacgagtctacctccgttgactctctcgccggtgcgccgcaacagacctggaatccgtccacgcattgattagacagggtgcgctccgccggttgcttctggtagaatattgtcacattgaagccggaattctcgccgacttggtctgtatggacttcctccgtgacccccatatgggataatgggactaatgcttcaatactctcgcgaaacagatctcccacggtatcatgaggatctacgtggatctggacggtcggcttcgagtagccatgagccgcctcgcctatgtagcattgaccctttggatagtcctgaccaatgtatagggttgtcgagcagcaaaatgctctgattgtagtgatccaggccaattggagtagtcgctggatatgaatatccggatgttcttcctgggcggctaggggagggaggttgagggcatcggcgaggtgcaggagtcgccaaggacgtacctttagggtgaggttgaccctatcggtagaaacatcattgactgctaccttcaatggagcagtactgagctgggaaacaattgtgggttcaaacaggacaggagccatgatgaagatgaagatgaactgtagcaagtgtggagaaacaaatcattacattctagtattagggaaactctggcctaaatgtacggcctggacagggacgaggcatgcaggagatgtctcattgtgaacatgctctcttggcactactccctttgttgaacgaagtgggcaatcaataagacctcgttattgacgccacaggcatttactgcgcgaatcatagccatcggcatgtttggagtatgcaagatgttactcccagggtgatcaattcgtgctcacggagtgtttgctctaatgtgagagcttgtatttggatatgggctgcctgagcgagctagcagaacgggcaattcgagccggggtttttgtggcacactctgcgaataaaaatccaaatggtaagggtcaaaagagacaaacctagtctggccaatcgacttcgaagatcaccgttgatctgcagtgtattttggcactcagtcaaccctggagtagggagtagtacgaggagtcagctgcacatagagtcaatgtactcactccgtaagatattaggtgagagggaattgatttagcagatctaaacttgtctcatgaattatatttaattcatcaaatcaaaattccaactagaatatgaggacctgtgaaaaggaggccgaaaatgaccacccgtgactttggagggctggcgggcgcttcaccgctcactgtcgagtactggcgccgttagccatcatcttccgtgatgttttgcgttcaacggtcgtggtccacgcccaaaatggctccctttgcagtcccaggactaagtgaaattccactgatagtaaaagatctcatcaaggaataaactccagtatcagcctccttgaacttgtaataccaccgacaacgccgtcttggtccacttgccaatcacccatttccacccgttcagcccagctttctaaaactttgtgtagatatgagctacgcgaatccacaggggcaccgacagccctgcctgcgaaacaggtgtgagagcagagtcatcactgggagtagtagggtgctagagaggagaagtggaagtctgcattgctatctaggcctcgggagtgcttttatgccacatagccgcttagtcatcttgctctggaaacccccactgcattagttagttaacagctaactagttagtcattaactagtaaaagatctcaccaaggaataaaatattctctccaatgttctccagtatcagcctctttgaacttgtcaataccaccgacaacgccgtcttggtccacttgccaatcacccatttccacccgttcagcccagctttctaaaaccttgtgtagatatgagctacgcaaatcccaaggcaaataaccactatagccaccgcaaaggtcctcctggtaaagttgatcaggccgttcggttcccggaaacctagcacgtttgaatggaacacctcgagcaaacccattgctgccgatcaacttttaaacgggatcgaagcgacatcccatccagccccaatccatgcatatttaaaaatcaggttgtgaagttgggccgataaatgggggtcaaatgcagtgaatgacatggctgagatgtaggtctttctggacctcggggttatggtgggagatgtggaaagagaggagcggcatcagcctaacaggattggttcgtaccctttacattttgccatctcgtgaagataggtaggggccagggttactttcatagcgaaaattgttgttatattcggggcattgaaggagggttatgtgcagcgtatttgggcactaaaccgaaagagacaaatctaaccggatacataattcacaggtccgctgtgtagatgaaagaattgacaagtcccaatcaatcagacattctgcataatcccagggtgaacgccctcaaggatcgacgacagctcagcccatagtttctcacgggcttgacgcccctcttcactgcgcacaaaaggtgaaagcgcagtattctcgacatgtccatctgtcatatatgaaccgtggctttcgagtccagctgcaccgcccgccaccagcgttcgagatccaacctccgtggatcgcgccaataccattttcatcaatttgaactttaagccagcttcccgtccgagttgtgaatggcagaaaccaggattgatcatgttgatcactacctctgatccacgcacacggcccgccagttcctgcacaagtagcacctcgagtagcttcgataatgggtaccgctcgtccatcttggcttttgtttggtcactgacgaactccattggctgatcttccttccattctgggaaatccacccatgcgtgtacttcactcacaacaaaggtaagtcggggcgtgcgggatggattctttgttcgtgtggctttcagggttggcaggatgaggaggctgaggaatagagtgttgatgacattaaccgtgagagtttgctcatacctctcggcagtgctaaattgcgctgtggcaactgctgcattgagaatggctacatcgagctgggggagctttgaaatgcgctcgccaaaagcaaggaccgaggcgtgggaagccagatcgacctcccacacttcacagatgcttgggcggcctgtagatttttcaatgtcctcttttgcttcttttcctgcagtcacatttcggacgccaaggatcactcgtgctgcacctagtcgcgtgatgtgacgtgcagcttctagccctaagccgacattggcgccggtgatcagcaccgtttggtcggcgaaagactgtgttggatatgtaggagtaacgaagaattgtgagtaaaggaaagccatgatgagtggatatttcgattgaagattcttcaacgatgcaaaagggtacttaaatagcagtgggctaaataggcaacgaatggccaacgtcatggagggcttgcgatccggagattaccggggttaagctcgtccgctctaacatcctatctccatgacctcggcattcgctaaatcgatatccttatgaccgaatataggagagatcactatgtccgaacagaaaactacaactgatgaaataatgtggatttggctggacactttaggtatgaaggggtgtggtaagggtgaatgcttgcaacggatgtgaggcgagacattggtgttatgtgattgggtatgtccgcttctcttacccaacatgacttgaaagtctactctgaagaggttccctttcagaaaacatggggagcatataaacaacgacaatccaacaattccaaagtcgaaatgtctgtttatcccctagaacagaacgaatcaacagtgccctcaaggccaccagtgaagccaatgccatgctgaggataaaacaaagggatgaaacttcccagaacattggactccatattccccaaccgagcatgggtattgcaatggtccaccgcgccgcagtatcaccccagactagaggcacagttcgccgaccgcgtttagcatccccggcttgatcggacatgtcctgcaattggactgtagagaaaataattccgatgacgacaaggagccaccgacctgaccagccaagcgggtggagagggaggaaagagccgcccaatgccacttccatcgctcccgatgcgaaacaggtaaatcctagtccattgataatgttccgaatgactgggttcttgtctgcaccaccccagttattgtaccacacccctaaacatatcaaagccacagaatttcggactcccccggtgaatgcaaggctatatatcggggcaaatatacacaaactgatcataactcgcgtgccccactcgtgagaaacccgaccgccgggaaaggggcgccatggcttgttgagactgtcctcggcaatggctctttgaccccgttggttgttgatagcgaatagaattaagttgaccagaatccatgataatgtcgcgacagctcttccaatagactttggagagtcgctgatattctgcggaggaggcagagcccctgcaacatgtgggtcgtatttcgacgcggcccaagcgtttgtgattccgaaaatagtgtttggtatcacaatggttttaaaatcgctgaagagaaatagccagagggtatatgagtggtaccacagcgaagtcaatgctccttggacaatcatggcacaccgacccatgacggatgagtgttgatgtttcagtcaacgttgatggtatatgttatacctctggcgtgagtcgggcttttatatctgatcaggtggaatccaaggcttgaggccgcaattttgggaatcgagggaactacagaccgtcaaatgagagactaaaacgagaaatcgagcaccgtggcctttttgatgtctcgtacaaggccctgagtttattctaaccagaatatattgccacattagggtacctagatagatattcaacaaggctgggttgtggccatactctccgatggccgagaataaagagtgttgtccaacattgtgttttgcttctctttcaccctgacttttatgatgaaagagccctgattggagctactataggactcgtcccactttgaggctcgaaatagccattgctacagttccaaaatattctgttcgatcgatcatgatcatgctagcttcaggggcagttgcaattattgcggggctactggcccaccagcttgtctgtattcatggagaatggcatctaaaggggcctagggtcgttgttgttcatcttcttgccagtattctattatatgcaaccctttttgttggtcacggaagcactggagccagtttggttcggacaatatacttgacgatatgctatatctcatccctattcacaagcattgcagtataccgactcatgtttcatcgattgaaacactttccaggtccaagattggtcgcgttgactaaattatggcacgtttggcaatgccgtgactcgcgtgggcatctcgtcttgcaggcttggtacgaaaagtatggggagtttgtgcgtaccggtaagatatatcgcaacccaagtaggactcctggataacgttgaaattgaattttcaggtcccgccgaacttaccatattccaccccgaagtctacgaggccgtggatggccctgaaaatcgcaacacgcgttctgattggtacgaccttctatatccccagatatcctcgatctttacacgcgaccgacagcttcatcatgagcgtcgaaaaatgggggagcaagcactgagcagaaaaggtctggtgaactcaatggcttacaaaaagtcgaagactgacacaatcattcagcattgctccagtaccatcggcgggtgctagaaaaggtacgcacactaaaaagcctagttgctttggaagaatcatgccccgttctcatcaacgatctgatgtatttcttcgcttttgactcaatgggtgatttcgcctttagcgaagattttggtatgatgaggaacaagaggtggcattcatcgatagcgatgctgcgctcggcgctcacaatgttgggtccattcagtcctgcgatatggatcccgagattggggttcgcgtttattccttcgctgtggaaggtccggcactggtttcatatgctcgaattttgtgatcagtgcatggctcgacggatggaggtactggaaaccatacgagaaatctaacatctgactgacatggagctagaaaacactctccgatcacaatattgcgtcttggttcatcgaggaccatgtcaaacacggatcagatcccacgcgggcgcggtggttgagtggtgatactgcaacactagttgtagctggaaggtcagtatggttaggttatcatgaggcaatggactgataactacagcgataccaccgctccaagcctaacgcttgtcttctatttcctcgctcgctatcccatgcatgctgagaagatatacgaagagatccaaggagttgatagggagaacccagctgcattggccatgttgccacatttgacgggcactataaacgaagccatgcgattgcttccagcagtacttaccttcagctctcgaataactccaccggaaggactgatgatagatggcacctttatcccaggaaacaccaaaatatgtgcaccacgctatacaatcggtcgacgtgagaacccccttgtcatctcttcaatcggaaatactaaactgagcctcaagttgagacggcatatgtcaacccccatgaatttattcccgagaggtggtacagccaaccggagcttatcaaggataaaagggcatttgctccttttggtgtcggtaagctacaactccattgactggtgcggtcagatctcccatgtgccagttgcgttgcatgggaataataagaggctcgcattctgagtctttgtttcgacagggcgtacaagctgtgttggccgtcatttagctcttgcacagatccgacttgtaactgctgccttgatgtttcattatcgaatcaaatttgcacctggtgagaataatggcgaggctgtggaacgagatatgaaggatcaattgaccgcgcagcctggtgcttgtcggcttgtgtttcaaagtcgggtataggtaaggtgaaacaagaggatgtggaggtaatatggtaaatcatggctcttcattaatctggttcgacttctttgtaatgttacgtgagaagtgttgaactagatataacatgcaaaactcctgttttcactttctactcaggccggaatccccaggcaacgtggatgtcaaatgtgacataacaaccagattgaatatccgcataagccctctgctccagctcatcaatctgccacatgtgcagcgcacctggcgaccctctagcagaatgaaggcgcgcccacgcgaacatagccctcatcccatttgcagtcaagcgggtgcgtgtatcatacacgcgatccgcagaaactgcctcagtgtggacctctactagaccagcattgcgcatctcggtagccagtcgattccagccaagcttgaagcggggtctcatggcagtcatgaacgtaaatcccattgcactcgcagcgtcagtcgtagaagtagcgcttccggggaagtggcgaacgttagtaaagtcgcactcttcccactgcatagcaccgccaggctttagcagcttagcaagattgcgcacagttctcccccattcagacgctgtcaagccggcggcaatcagtcgaatgtgcacgatatcatactgtccgtagaggttgacgggaacatccttgcgcgcgtcgagaacgtgaagagtcacgttattagggagggttctggcgggtggatagagcgatgttgatatgtcaaagccgtgtaagattgcgtcgggccagtcatgggcgaggtagcgcaggaaggctgcagtgccggtggcgatgtcagccactcgcgcatgggggtgcattttatctcgaacggacgggtgcagcaggtagccgatgtttctgtttcagcaggagtcagtaaggtttgattttgggctgatttgcaacataggacttggcggatttgcttactcggtgaggagggcgaactgctcatcgagtctacccagtcgatgttagtattaaatgttttattggtgctggtgagctcttaccgttgcgcttcggtggaatctcgctgcatattctccgcgtatggatccatgaaaagagacattttggacagcgtactttggatcaaacggaaggtcggtgtctcggaacgtacaaataaagggaggatgcaggacgctgcagcggactgatgggaagagtgagatctcgatgtgaccaggttactctaatctttgcctcagaaagactgaaatttggtcttttactgcagtcgccagggtcgcacctgctttcgcagctgaacctctgctgatccgcgcattgcaggaagttgaggtcaaggttatcacgttgtacgaaatgaactctgcggtattcatggacgttttccatatctgacatctctgtatatgctgtcctctagattcaaccctaacagattagttgaaatgatggtatctcttgagtttagaaaatgattcctctcgacacttctgctaacagcccataccgccgaacaactttgctttatattgtcaaatattgtcattaattataattctttcaaatatgatccacttgaatcatcgctctccggttctgattgtttggagtgtgatattcttcttcgttgctgcagtagctgttgtacttcgacttgcctccacacatattcgacgtcgggggttgaagattcatgattaccttattttcttctcactggtaggtttgactggggattaggctattcagccggctaaggataatgctaggtgctactgaccggctatgtggtggatatgttgattggtaagttgatccgatcgactcgctatgcagcaaaaagagctaagatcttatatcaggagctattacctctggctatggcgggcatacggctactatggctgtagtgcaacccgggagagttggttagcgcattgaaggtacctcgtctccttgaacgtttatatgaggtatcgacctggttagattttctgggcatcagaatggatgtgggcaacctcgacagtctgttttaggctcgccatactccttttatatctggagatcttcccgggcaatcagaagttcttctggagtgcaaccggggtgggatgtcttgtcttcctatactgggtatcatcggtattgaccatcgcgttgctctgtcgcccggtcgcctacaactgggatcgcaccatcccagggagctgtggggatattttgaagatacagtatgcatctgcagggttcaatatgggaattgatttgggagttgtgttgctgccgctccctattgtttggcggctgcaaatgtcgagtcgcaaaaagactggtgtcactgcttctttcgcgataggcatcctgtaagccccccacaagctcactcttattctgtttcagttgctgaccgctagtagaacggccggtatcaatctgggccgcattattcagaccaagttgtgtccagctgacgacctaatctactgcctcagagactcctctatttttatcatggcagaaatgacggcaggaatcttggtggcttgtgttccaacatttgggcccttattgtttcgcaggcgaaacacacatccagcgtaaccacgcgatttgcccacaattgggtcaattagaatccgccgtcggcctgcgaaattcgattctctcctttctactctcgatcgcagtcactatgacgaagaacgagaccatacaaaggaattggagtatgtgggtgcgcccacagcacatgctgggactgggactgagaatgaagccccagagactggcattttagtaacacacgacctcgatgtgcatagtctgaatgttctgcctcgagtatctgagacttcgactgtttgaggagcagcgattttctcagagtggatgttcaagatgcaagttcccttttcctaagagatctgcagacctgccgacgagaatatgctccgtaatgcatgtccgatttgtaccacccttagatgagtccgagccgtttgtactggccaatttgtgagagtaaacaaaaatacatagttgaaagataaaccaattggatcaagcttttcctcaactgggagagtatggtcgtgaatttttttcttttccatcaggcaccaacacctgggcacgatataagactgtgagaccacgtgcggggaaaactccttgactttcttttgccccaactctctctctttcacaactcaccatgccttgcaagtcctttgtggttgtgctctgccatggctcttaccatactcctgccccgtaccaagctcttgttgatgccttaactgcgaagggcatcgaggctcattgtccccaacggcccacttgtgatctcagtcagcttaatattggcaaccctagcaaccctgattttgatcgcagggctcccccaggaggctatccactccccgcagatgatgcgacagagatcgggctgctgctagacaagttgattgcacagggaaagtcggtgctacttgcaggacactcttccggtggctgggttgctgctgaggctgcacagtctcatcgccaagctcctgtccgcctaagggaaggaaagactggtggtgtcattggaatcttctttatcggggcatttattgttccccaaggccaatcagtgaactcattctttcaacccccgggcggtaaagttgttgtgcctccgtttatgcaatttcatgtcggttgaccagtgaatgaatctttgtttgtaagtactgaccgttagtatagaaacacggtgtcaatggtcttggcaccatggtcgaccctgaagaatacctcttcaacgacctcgatagtgccactgcaaagaagtgggcatccacgttgacagcagctcctgtgatgaacagtccccttacccacaatccttatgacgtgctcccatgcgcctatgttgtgttagaaaaggaccgtacattaccaaaggagtaccaagaaggaatggcggcgagtcagagcaagccgttcacgatctaccatgcaccctgtggtcactcaccacacataagttggacaaatgagctcgctgcgaagatggaggaatttggaaaccaggttctagctgaaagaagcacgacagattaagtgaatttcagaaataaatctttcttgaaaatatacaaaagaggaaacatatgagttacactcgaatcccaaggtttgacgaataggaaggtcaagatatttgtgcaacgcgcgcgtcttcgctttctaatgcctttccactttctcgtttcttcctctctccgacgttgtcaactacttccccatctctctatccatccagccatggatacccctcgctatgtgttcggcgcacaaggattcggtgtcgcctggacagttgacaatgttgaccacttgatgaaaagcctcgcggaggctggaatccatcaattcgacaccgccgccttgtatcccgctaccaatcctggtgaatctgaggagctgctgggtaaaaagaagccagagaatgcagtcatcgacacaaagattctcttcatgggcgatgactctttgtccttcaacaacatgggagcctcgatcgaagccagtttggagcgactgcagatcaagcaggtgggtaaaaggcgcccacttactttgtgtgcaatgctaatacggctattactagattcacaccatctacgctcatgccccagaccgcaagaccccgatcccgcttcaggctgcttacttcgaccattactatcgtaagggctactttcagagattgggtctttcgaactacagtccgtccgcaatccgtgcctggatggaaatcgcggtagaggaaaacttcattatgccttccgtctatcaaggccagtacaacgtgttctgccgaggctacgaggatgaaatttttcccgtacttcgcgagttcggcattgccttcgaagcaacctcgccgttggcaggtggattcctcaccgggaagctttcctattgcccttcacccgaagagttagagggtacccgtttcgaggtcggtgagggcaacatgctcggtgcagtctaccgtatgtggtatgaccagcccgtctatcaccaagcgatgcgacgattggacaagattggtaaacggctaggaaccaccggggcccaatgcgccctgcgttggttgcttttccactccaacctgaaggatcccgaccgaattgtcatcggaccaagcaccttgaaccagcttcaagactatgtggacgcccagaaggccggaccacttccagctgacgcagcggccgagatcaatgcgctttggccggccctcaaggaagttgcggcgacgatcatcgagaagggatggtggtctctgtgattgatatgttgaacttgagggggataacgaccaaatttccaatggatcacgaggtattcatacgccgccaggctggtctacaaacatcttatcaagttaagccttatgctcacagacacatacaaactacatgcaatggtatctcctagtttttcacacgtattgctcctatgatatcattccctctggtaatttaagacctacacaatcgcccattctcacccaatctccaagcctcactacccacagccttaaaagcgtagaacctattgtgaggatcatactttctcttgatctctagtaaactgtcatagttgtctccataaaatgcatgttgccaatccctttggtttggatctgcttcgttcaaatatgcaccacttccaggtgtcaggtcttctagcggtggcataaaaatatcggtaatgagctggtgacgagcgacattgctctcccagtcagtgtagtcgaacagcctggattgagattaacaaagacttgccctaaccctgaaagggaatgggaatgaattgcatacgctccaattacgacattcatcaacgcatctcgccaggttgggttgacactgttgtcgggatatgcaactcgagatgagttgaccataactcctgaaatgagaaccccggcgtttctttcgacaacattacggaatgtgttgacaagctcgcccaggttctgctcgactacagatcttggaatcaggcggccaccagcaagttgatcagttatgttgtctggtgggctcatcatctggtaggcgtcgtaatatgtcgggaaaccgttcacatagtatgctgttcatgctctgtcagtgttcgctccaactctgtatcgccttgtacttactgtgctgtatgttcttttgttcgaggaatgaaatcaaaggtctaaaaagggaattgaaaattgtcgctgatctgcccggaatggtagtaggcgtcattgacaatgtagtgttcattaaccaccaaacacttgcacctccagcatcccggaccgagggaagaatcgaaataaacatggcgacggctgcaaagaatgtatctcgcgatacacccttgtcggagaatgaaaggttacctgacgctgtcggcagttcagggtaggccttgctcgtcatcgacacaacaacaccattcgtccctccacctccgccggacagtgcccagtagagatccgaatagtgtgttggggatgcggtcactagcttcccatttgcaagaacaacctcccattccaggacttgatccgcggcgagtcccacatgggacaccaattggccatggccgccgccttgcgaatatcctccagccagcccaacggttggacagttcccgccgacgataacaagcccagctttataagcggcgtcgctggcttcgaaggattggaccccggctcccatcttcatagctttaccggaatattgtgacgagacgtaatctacgatggaaatatccttcatgtgatgcatccagatcgccagtcctccagctccagtggacttcccaagtaggtcatgtcctgtattacggatgacaaggcggatgttgtgacgagcagcaaaattaattgtcctctggacatttgcgggatctgtcacgttcacggcgtactcaacgtagttcccgatcgcgcaaggtgaagattttgacgagaagggattgcagcttaatttcgtgaatctggacgccataattgacgaggaactttcgtaatgcgttgctgggaatccccaattggactggatttgagcgcattgcgattggttgtacggggtgaacgaggcgatgtgacagacgctggcgattgggactgtcataattaacttgttgtccactgttctgttgaatcgtgttcatcgatgatcctcaggccagcagggatcgtgtggcatgcaacgacaggcaagggaacttgtgtgattcccgattgaaagaccacaagccacagttgcggcacgaaggacagctaggcagagccgcatacatgcaagagaagggttggccattgtgataatcggacttcggctaacttaatgtcactcgagtagcagattatatacaaagacatattctgcaaagcggaaaccagcctgtacgcactacatgtaagactttgatatacaccgaaaatatcacatcacttcggccctgcataggtagctgtgactgcaagtctgactctgagcctcgtgaggtagggcattagttgaaattccacggaacaaaacacttgctcatcttatatatgtcttgtctaagattggtgtaaccaggtatgtgcggagagagtgctaattttatcacgataaactcgaaaaattgggggctggcttattatctttgcatagtcaagtttactgcagcctcttgcgacctataccagcctttgcattgagttgtttgtcgatgaagtaaagggctatagatagatcagctcacttcggtgaaacacaagagataataagcgcttagtacagctattgaacgtagaaggactctattgaactgacactagaatctgaccatagaatgaatgtgaatgtgagatgagtgaaaggctcagggatgaatcctaatacgaaagatactattcatgttcgttgaccagggatatatatcactgtacgaagtacacgagcttgcaaaccccggatggtgcttttttttggagtgtttacacctgcgaatattaccataaaatatgtccattgcctacctttaggtcgttaactattggatgttgtagaaggctggaaaaaaaggtataccccgtgatctggcataaccacagctcgatcacgatgccaagccacgagtggccgataatcggccgcacacccgagcctaacgcacgtcacctcttctaggcgccatgggatcctcgtactctacaatatcggaggatgtcaaatctatccgaaatggaccttcagcctcccatgaagaaaaccaaatctattacccaagacactcagctgatgcggtcgagagcttcaacattctccgacaaaagttgccgtctgaactcgtcctggagattctagaattggcagagtattgggtgttatctgccaccttcagagcagacacagtgggttacgatgaaggcgactgccgtgatcgaaccccatatttgacatcggagcccatccaaggcgagcgatttcccgttcgagagatcagaatcaacatctggagccatgatcagggatggagcagctatggtgaagatcatggcacatacagaaactcttggacctggttcgatcttggtattgaacgaccgccgggacgagatgatatctccaaagatgaagacctacgcctggcgacgaatgttcacgctagacgcgaaactatgcaccaccagattacgtaccggagggaccagaaattacgctggatgcaaaatcttcaagcaggtgatcggatttcgattataccacgggcgcgttttcatggctggcgcaataccgtggaaaaggcttctattgaggtttacaccagccctgttctgtgactatgtccctgcattatttcatattcgtcttgatttcaaagccattttgtatggtctactttatacataagtgaatgtgctcaactttcttcgatctttctgacatctatcgatgcgttcccgaagacagaatagcggccacttcctcataaacagaaaatacgatgccaccactcagaagtagccggcccaatcgcatggaactacccttccaaaatccccgaagcccatagtcccgaatcacgctccgggaggcttcaacaatgccagctccttcgacaccctgtgcacgtgtcttgatggtatcaaatggttgtgtagcgtacacagtaactattcctgccaaggcaccgatgccgaacgttgtgaacacatttggcttgatgcccttagccttcgtggcttctttgagcacgttatacgttcccatacgaactgcagaagtggccgattgcttcatcatcgtcgacacgagaccgcgataaagctcggtgataccatgcctttttaccagcacttgtattgcctgtatgctcgacttgaattgccgagcgccttttgcatcgtcgattctggggcgggatcggtcagctgaagctcttttaacatacaagtggataccaacaatgccgtcttgatcctctccgtcggtgttactgctagtacactctctacagcgccagcggtcattccagcgagcatcccccggccagccgagagaacgccacgatcatctgcaagagagttgcggattgtatcgtaggatacgaaccggaccgcggcctttgctgttgttccctacaaaatgtcattaatgtgacgtaaaatgccattggagacgaataaaccgacgatgacaagagttgagcatcctgtgtacagagcaccgacaccttcctgtctcgcaacttgtacgatgagacggagtggatttgatgtccgaataggaccgtcattcgacagttgaacacgtgtttttgaatactcaaatggatactgcggccgtcagttattgaactcttgtgtaaatcaagaaaccgaccgttatggccgcttccactccaccggcaattcctccggccacgagggacacccactggggcgtgtaaagctagactaggtcagttaaagtactcaattgacgctcaactgaatgaattaccctcgtctgttgtgggccaggttctgatttatcgggcgcagacatggtatgacagtgacagcttgcagcttacaccggttgaataataaggggtttggcccaatgggttggagatattctgtgggggaaaacgggatgattccccggtatgcggggacgaacggaagaagagttgccgacatattgcttgctgtcaactgtccagaatatttcttcatggtattggcaaattctatctacacataagttctgcagggacaaatagaaccccgggcttgctgtataccacttcagacgcctcgctctcgaatgcagctctcgagatagccggcacataagtgtcttcttcctgtgccttgaagcttccttgtcagggcaacgccgggatgaactcgagctcgaatccctgtatgctaggaattgtgagcggtcgcggcggacgtgatgacctttatgttaccggcatcgcatgatggcggcgattgatgtggcaggcctggcactagaggaaggaggaaggaggaaggagtaaaagttcggcaatatgtcgcaaaaacgcaacaataatgcattaccatccactctcaccgatcatacgaccaagccgcagggaccgatggaaaaaatgcatgcttcatgtcctgaaacgcagctacatcctcgttcattatcacggaaaaattaatcgcagagccagcgtcagggtcgacggggagccaatttgatgtcatgcgggtactcccatctggcatctcgagtggtgtgagacactcttcttctattcttgagtgttgatggcgcggggagctgagactgtgcgtttgtccatgagcctggtatggagattctaatgccgaggtcgcgaaacccggcccgaaatcgaattgcatgtattggaaatcttcgtagtcgacttcaccttcccacccgcttgatgaagcatggcttggttctggggacgcgtgaggatctgagtttggagatccagggaagaaggcgagggtctttggggagggagtcatgaagagcgctctttgtgttgcgagctgtaaatctggacggggatggatacgggggtttggggtggtttgggatgattggcgtgagaaactagtatgattgttagctagctagttcaagatacgcgtcttttcttcttcttttgtctcgccagcaaggcactggtagtaatttaccttttgacattgtttttcgttcctccacaatcctctctcactagaccggcgtcataccatgtttgcggatatggttggaatgcggtcgatttgaccgggtattcatccacccagcttaactgctcaatagcccgggagggatctagtccctcctgcatcgtcagaggaaagtcgctggcgataaagggatgcagaccgagctcatcgtgctgtcccacatgcaaatcaatgagactctccataggccaggaggtagtctcgtatggaaactgagcttcggtcatggtgaacgtgctttatttaccacaggttcaaatgacgatgggggcaaatatagtaggcaagacacagatcaaagagaaaagatctggttggagttggagttaaagttgaagcttgaaatagtttctatctctgtatgaccttgctaccagcgcaaagagaaaagcaaagaatgattactcgcaaaaccgggggcatcctgtacctatttaaaccaaaagaaaatcgaattcaacatcaaatcacggagctggggagctgtggaaatgcggagttgcggagaatctggggcagctccagcggcaaatatattcctagagaccgcatgatcccatgagatccttcaattaaccgatttccccggattttacggtcaaggccgtgcattcgtgggaggttgttgtccaatcggtcaattctggtacctcggcatcgagaatttaatcgaaaccccgccgttgagcggataaattgaagaggctcgaggcttcaggaacccaaataagaacggggaatgacatcgccttgtttcgtacttactatgtaggtataaccggtttaatatagggttcggaggaagatattgtccacaccacattggaagaatggaccgagataccctcaacggtaataaattatatacctccagatttatccgcccttaattgttacatagaaagaagcttccaccgaggaaacgccagatatccaaaaacgccactccagaactatacaatgcgtagaaaagtagtatccagtcaaccccaagattgcgtacaacatagatcgaccgtggggaaaggggttcccactcctccgctcaggtaggcaaacccacatcgggacgcgtgctttatcctgcagggcgcagggatcgacaggaacagagaaatcctagccgggcggcttgtggggtatttacagggccaggccagtcccttttcgcgtccagcgataaagcgcgagaactgcttttcggcgatgtcgaatttcactcgggttaacaggtcgacctcgagcctgggcaaccgcagagcgcatcacttgccggaagctgcgttggtactccgtgttgagggtcaccacacaagattctgtcgctcggatcatggtctcgcacgcgttgagtatgccctcgcctgcttccttttggaggcgctctacgataagtagcaggaggaaactaccctgcagcagctggatgccgaagaagtaaggcatgaaactaacgtcggggtcgaagcggaggatttgttgcacggaatcggccgcttccagtgcgtgtgagatggtcgacgcaaaagccggggaggatgtccagaaatctttatcttctatcaatgagacaggatcccactttccgacgagcaggatgtggaggacgtgtgtaaggtaggaggaataggcaatcacggtctgggtatgccaagaataggcctcggacaattgcggatcgacaggttctggtttgttggtgtaagcagtcgttgacgaggccgctgggtctgccgccgccgccgcgaaggttgtgagactagctttgtatatctcaagctggcgcagcacttccgatacgtgaacctcccacgcttcctttccttgaagcctgacaccgagagtagggtggtttcgtgcctggtttagatcgatcagttcgccagtgatcgtcatgagtgggaggaaaaagccaagaatggagtggtcgtggcaaataaagttggggaaaatgcgacgtttattttggtcgcccgaccggaggcattggggcccatcgggacgaggactattgctgtgaatgattcctgcttgccaggagctttcatccagtggaagcaacaggtcctcgctctcggcatccagtagggctagcggacgattatagcataatgcaagatggcggtccatgatatatagcagccaccaggttctgcgccgctcctcacgatgctcttctgtaataggaacattatgtaaatcatgttttctgtcacatacacaattcagatttgggcgtgaaggattagagtagtccaagcccagcccacctggggaaccaggccatccacctagaccgtagccgaaggacggacttgaaccatcgctcatgctgtcgatattgggtgttatttccatctcttgattcaatttaagttctcgagctagtgtaaaggccgcatgccacctagtttggagttagtggagtggacaaaagataagagcaggtgtacaacgaaccatctcatacttgctgccttctgttcactagatgagataatcgaggccacatgaatataggtaatgacatcgtctaaagatccagcggggcctaccagccctttatcatcaccgactccttcgaatgggtggtgagtccctgcagagaagtcgtgggtggttgtgttttcggcgggtgatgaatcttggtctttgaatgagacatgtatcaaaggccgcagtaagcgaataatcaacgcacagagaaattggcatatctttctccgttgtaatggtgagatggataaagagaaagctcgatcatccacagcagctacccagagcatacttgccagcaaggcaggactagtgggcctggggcggtcgacacttagaaaagacgtctttcgcaggacatagcaatgaatatgatgacacacaggatgcatatgggttgagaaagcactagtaaagtagagttcaagcagatcgcacaccagtcgacgcgggaggtgcgattcgagaaaaggcatgagaggttccaaaacagggtacttcaatggcgaccgggagattgatgaccgtcttcgtcttgaagggttcgtccccgacacagacggtaggggaggggcgtgctgggccgcctggtggccagcgaaatcaaccggattccaaatatccatcaaccggggcaaaggcgcgtcgctgccacccgttcctgcaagcatatcgtacgagtctggcgacagatgtgccgctgaaagccattcctctgtgacattcgcggcaggccctgtccgctgcggctgtggacaatctggcatagaccgagggtcgtcgacaccggcgctgatctcatttgttgcaggcgatggctgatgaaaggtcgatgtgggagaattgttttcaattggcgacagcctctgctgcgactgcgactgcgacttcgactcccgcttgtgttccccgtcggcctgcttcccctcggcgcggtcctgggttacctcgtcctcggcattcgtatttccatttgtcggcttcgatctcgcaatacgtcctcgtttccggcgctcgcgggtaaattgacagtgtatatcaccgcgaagacacctcgagcaggggaaagcacgatcgcatcgtacgcggcgagtatggcatgagtcgcaggcgactctgtttcggcgccatcgtcgcttgccattcggtagctcaacctcgaccgagtcaggggccggagacggctgatcaccctgggactccatttcgggacgtcattggcgaggttgagtgttgaaaaaaaaaaggaagccgaagagaaaagaagaatgttgcggggaaaaggcatcgggcaattggacttggcaatttctccaactcatttagttctacggagtactccatcggaggaacgttgatcataatacgcttcattcttatttacatattcactattcacttcaccctttctggagtacactcttgaatcgcttcaacgctcgatctcgactctctgcatggtccacaatgggcttggggtagccgttcttctgcgcaatagccgcggctcccctcgcatatggttcatggatggctttaccagacacatcgcgcagctctggcacccagtggcggatatactctccctccgggtcgaagcgctcactctgccgaagaggattgaagattcggaaatatggttgcggatccacgccagtactggacccgaacccccacccgccgtgattggacgcgaagtcgccgtcgattagattctccataaagtagcgctcgccacggcgccaatcgagcattaagtccttggtaaggaacgatgagacaaccatgcgcgtgcggttgtgcatccaggcgcagtggcggagctggcgcattgctgcgtcgacgatcggaaaacctgtcttgccatcgcaccacgcttggaactgatccttatcgtactcccattcaatatcggtatgttcgggcttgaagcatttgttcatactacaggaagtctttgcattagaatgggaaacccgttggcctaggagataacttaccagatgaagggccagttcaccaggacatgtttgtagaagtcccgccaggccaactcgctgatccacgtcatgtaaccgggatcgtatcgatcgagatggcctttgttgaccctcttcgctgtcgcgacagcagtccttacgctcagcgctccgcatgcaatgtaaggactcaacaccgaagtgtgctcaccgggcaacatgctccgcaactcctcgtactttctacctttctcctcgagaaatttgtccagccgccggagggcttcatgctctccggctgggtaaagtccctcaaagcgtttctggtcttcgcccgacaaggtatgggttttaggtgcggctggcaccttgcaattgaataaatccttcaattgatggcgcgcgttgcctggatttgacccgggctcctcagagacctcgaggtaatccgggttctctttcaagaaggccaaccaggagcgataccatggagtgtaaacggaatattgtttcccttgctggctagccagcgcgcccggagtgaccacacatgtgtcatgagtgggagcgaaattaatatcattatccgcgcaaagtctaacaagcttagcttcgcgtcgcagttcatctacctcatactcgatattcgcatataggttcttcgcaccccactgttgacacaattccacaatccgtttcgggattgccttccgtttctcttgtgtttccatgtgcagagggatatccaactcccccaggtcctgttgcaatcgctcgagggtgcgcagcgtgaaatccacccgagcagggctagtcaaatgggcagtccaatcttcgggggagacgatgtaaaggccgatcaacgggatctggttttctttcgcagtttggtaggcagtgtacagtgacctattatcatgcagtcggagatcgctcttgaaccaatgtaccacggcattacccacgttgatcgactggcgcttggtggcggtttctcggcaagccctctgtagcgtttcaatagggcgttccagctcgccatcggtgtatgctcggcagcgctcattgctcatctcggccggatagaactggcgtaggactatgccgaaatcctcggtttggttcgcgttcgggtgcggttggtgcaagtctggtcggccttttttgctagcactcaagccatcatgcttttcagctgccggttcggtagctttcctcttcggtggcatggctgaaaggttgcgaacaagctcggctcgcaattgactgaacagaaacaggcgcgggattgatctagaacagcagagaggcagtttctgcattactgagaataacaaggacaaggggtgctaaaaggtatcccaagtccttcgatccagatcgggatcggcttcagatctgggtgacgtcagtatccgatctgatcgcgatcgcgtccctgtctacggtctggacctgttggacgcattccttggtcggaccatgctagttctgggattccgattcatttcagttatgccacggagtagtgacctcagtccccgtttcttgccaatggccaatttgggtatacggcagatctggcgttgaccaatcccgcgaatgtgaacaggctcttgttctggtaccaattccccacaacgactgcaattaaccaggaagtacttatatttcatacttgtcatctccgagggctcatattccatgtcttccttcgttgacaaccttgtcaactacctggccaataagtacaccaaacctcaaaacaagggggatcgacagtcgagaacaaaaatccagccaccgttcaataatgcgatgatggaggcgtaacaaagggagtccatccctgttgatatgtacttctggagtcagctctaagtataccccaaacttccggtccatggcctcggaacttctcgaccagtctgctttcgtcaatttccccacaaccccggctgtcaggtgctcttgtatgatccgattgcctccattcgccgccgataccgtcaaagttctccccgccactgttcagaccctgaactttaaggtcgctgggaacaaatttaatagtttattcctatcccctaactcttcccatcttcaattcccccctatatctatatctatacctatatctcatccctccttccctaatccatctaccccagtgcacaaccagcaatgtccctcaaccgccaatggccacaaacgacgcccgcagcgttgaagactaccttattcccggcaacggcccatccgacctagctcgcacaggcgtcttcgccgccttcgccgcactagcctggtacaactccatcgagctcgtcatcctctgctttttctccttcagacgctggaagggcatctacttctggagtcttctaatctcctccggctgcattatcccgtacaccctggggtacgtccttctcttcttccggaccggcgttaccccctggctatgcgtgaccctcgtccagctgggctggtacggcatgatcaccggccagtcggtcgtgttatggtcccgcctgcatctcgtgctgcagaataggagactgctccgcggtgtgctatggatgatctgcattgacgctgtcatttttcacatcccgactacggttctcttgtacgggactgttgctcagccggcgagtcactgggcccgcgcgtataatatcatggagcgagtgcagctggtcggtttctgtgtgcaggaattgattatctctagcatctacgtctgggaaacgattaagctgcttcatctcaggcctgaaggtcgccctcatggcattctgaaccagttgctggttatcaatatcctcattcttctcttggatatctcggtcgtcgtcattgaatatgtcggctactatgctatacaggtcatgttcaaacctgtcgcttacagtatcaagttgaaacttgaatatgctattcttggtaaattgatcgcggttgctcgtggtggcggctccgatagtcaggagatgcactccagtacgcgggagatcaccgagtctagctcgtttccgtcgaatggggatcggcctgcgaaccgggagacgccgatgcgtgttcgtcgcgagtacagtccatcgtggtttgggggaggaagctctggtcattctacatctagtttatctggtgtcctgcagaatccatgacagcaggttttagctcttggcttgcttgtacctaatcacatagatgttgagaagctctatctctttacaggtgatatagcatgtctcaaatgttcatacgagaaattaattgtcgaaaatatgcgaaaatattcacaatggctccaagcgatatctcaaatatattcaacgatagtaatcagccaatccagcggtacccgcctgcagcaccaatacgctgccataaatcttattctcgggctgtaccatcgccgtaccgacaggtcccagaacccggcgggtatcatgtccaatactatcctccgaaagacccagctcaatattagaagagacactacgacgaccaacgataataatgttgttcgccttgttcgaagtgtggttaagttcttcacgcacagaaacgacagccatttgagctgcgtcggtaatggtatcattgacagctggttggtggaagacgacacgctcttgaagttcttctggaacagaatcacgcattgtttcaaaaaagaccatatcggactgagagctggacgcagggatcgcactcgagctcgaagcagatactgtagtcaccacggctgttttagtgacatcgcctcccaatcctccaatctgaataacagtcgcagtgacctgatcattctgagcgagctgcatgaccatccgaagagcgaagcggtcatcatcaccgccaaagaatggaaggacaatgtggtgggagcggctgccggttggctggcgggcgaaaattgagccctggagactcatagcgctggcggtacgtgagatcacggggcgctttgatgaggcagaggatggactgtattcaattaggatgcccacatggccggggacccgctctaatatatcagaaacgaagcttgtgtaggtgccgttggagaaacgatttgcgtcgtcgatgtctagcccattatggcggtcggccagtgttccggtctcgctccaggggagaaggagcagatctgcggtgtcctgctgcgccatgccgatgacggtgtctgcgtaagagtgctcggggacgacagatacaccagccatgagcgagagatcgtgccagtctccgaaggcgcggaaagtgttgactaccggatcccacagtgcatgctcgcccgcagcagcaaccttcatgacactggaatcacggtcggtcaattccatcagcctaacaccgtgcaccttaagtgtggtgttttcgtcctcttcttgggtaataggatcttcgacggtttcctcggtctgttttggcatctttgaggggtgaatgcgtgatgacacggatgcacgtcgctttgaactgaggagggctgctatagtacagacacccgaaagaccatcgagacgaaggtagacgaggagcttacgtactgggacggtcttcaactgatccttggcaagggcgacgctgtcgttgcggccatcatgctggatagggttgccttcccagtcgatctccccgcgtctccaccggtcgaccttgacctggtaccatcttggatacagcaaggtggttaatggagtggtaaggaatgtggtgaccaaggccatcacgacgaaaattgtaaacgtgcgagtgctcaaaatcttagcttggagaccaatgttctggggttactgaattagcatccattctcaatcggaaaactccctgcaggttgtactcactagcacgattaattccaccaaacccttgcaactcattaacacaccgatcgaaaagctttcgcgccataaaaggccacagagccgcgatgcaatggcacctccagtgactttcgcaatgaacgcgatggcgattacgccaaccacataaccccagacgattccagagtcaagaaggcccagattggtgctcagaccggacaaggtgaaataaagtggcaggaaaatgacagcgaccaaatcctcgactttctcagtgagcttgatggcaaagccgccttcgtgtgggcagatcagaccgatgacgaagcctccaaaaatggcgtgaacaccaataatctgtgtgaagaaggctgaagccagagcaataagcagagtgagggccaccactgactggctgggtcccttttggagactgcccgttttctcgaggaagcggaggaacagtgggcggaaagcgaaagtcaaaaacaacatgtaggcaacgcagactagtaacacgtacagagccgtgattccactgcccgcgttgacaagagcaacacatagtgcaagcaggatccagcccaccacatcattaccaacgccagcggacagcacgatcacaccgacccgggttgagagcagcttcagctcggtgaggatacgacacagcacggggaaggccgtgatggccatggcgataccgatgaacagcagataggtaccgaaggcaatgggcttggtaccaggatcatcgtggaactcatggtagaggccatatgaaatggcacaacccaagccgaatggcaagatcatgcccgcagcggacacgctcaaagcgacccgccaattactgaccaggaagcgaagatcggtctcgacaccgaccaagaagaggaagagtataagccccagattggcgactacattgaggctgggaatgctggcggtcgggaaaatcgcgtcggtgaatccggggatgcgacccatcaccgatgggcccagaacaattcccccgatcacctctgcgatcactcgaggctggcgaatctttgagaggggccagtgtataaggcgacatagcacgatgattatgacggcctgcttgtcagttatatttctgtttccccggatggcgacatagttacctggataataaataacaccagtggattcttggagtcataatgggttgggttgccgccttcgaggatgccaccctgcggactgactgcgttagtgctattggccgtagctgtcgtggtcacgttcgcggtcgccatactggatgatatccagcttcggcagagagaacaggcagaggagatcttttaagtcacgacgtctccccagcccaagacaaatgaaagagtcagcctacgctaagaccggggccaataagatttaaagtgccatggatccttaacggcttggcctcgctagtcccaacgtggattggtcgaaagttcgaattattcattcaatgcgggaatcacgtttctcttcttgaggggaacaaagcaaatatcactgcatgcggccgaggaatgggcagtctcgacggagtacattctttttttgctgtgcacgaacacgaccagccctgaaataagaaagagttttcataatctgcgcttttgtttaaagttttcacgtggtgatggtgacatgacagctcgggcctttggcgaggcaggtgatctaccccggattctttccccagacacaacatccacagcatcttacggtctatgcatcttggtaatgtgacatctgattctacaaggtttttctgataaaactcgtagcttgttggcatgtcctcttgaatcatatgtctttgtccatgtgatggagcacgatatacatgtactatatatagtgggtttgaggtcggaggtcattaaccccttgagttcaatctcgtgtatattgtaattaatacatttttggcctgtaagattaagtactctcattacagcgcttccaatatatattccaatgatctatcaacatgaagctattcagagattacctggtcaccatgagttaatttaaatcgattcaaccaacaataataaagataaattaagtctaagaacgacttttaaatgccagctagtagagagtgtctaattaatcaaatgcgccggtatttaatgctagttgtggctcaattgtacaaaggcttcagattaaaggtctcatagagaccaaacccaatgaaacaccaagcaaaatgcaaaacctcctgataccatctaggaactgaaccaatcaagccttcttcgtcttggccttggaggtccgcactctgaagaggtaatagagcgtaatagcagcaaaaatattgaaaaagaaataacaccagaagatcccgtagtttcgccagcgatgaacccactcaatcttcctcgcagcaaggtactgatccgccgaactgagagaacagtactcacagccagacgtagcattgtaattggcaagtgtcccggctgcagtttcgaggtacttctccatatactggaagcaggtctgaccagaaggcggatcaaagacactcatctccgcagcattgcactccaccgggcggccatggagcgctgtagcgctgataccgccgatgtagtaggtaaatggtgagacgcgatacatgaagatccagaagcggggcagatcatcgggcggctgcatcacgccgttgaagatgaaggaaagaccgaacatcagcgtggcgaccatagctgcgagtgcaggctcggggattgcgcagacgaccagctgtgccatgcttgcggcgtagatgtagaattggacgataaatagcatgatcagtgcgcggcgctcggagtcctggtcggcgccgaagacgcaccagtagaagcaggcccaggagcagacgccgaggcaaacttggaaggggatttcgacgaacatctgggagaggatgaagactttccaggagtagatgcgggatgggcgttcgcgaacttcgtagagggaacgttggacgacgaacttgggcatgatctggttgacaagtgtgttgaaaattgtgcacagaaggaaaatactgaagagcacgttttggaagccttgttgggtgttgtctgatttccagaacgagaagccgatgaataatccagacacaatacccaagataaatttggagtagacgtattctggctgacggtagtactgctggaagactcgttcaagaacataatacagctggcttctgagtggcatggcgaactcggagttgtcgtcgtcaaattcgtcaggcccgtccaatgaaggtcgataagaagactgtttgggatcattatgaagtcgttcgacctcagcctgtacctcttcatactccgggctcttgttccaggccgcaacccagtcgattgggcaagaatctccagcaaccatttccaagatgtattccgcgggattttcgagttcctcgcacggtcgggcgccgttgttctcgaagtaattcaaaagggtggaagactgatttccgatgtcgccaaagtagacggtctttccccccttcgcaaggaagagcaaacgatcgaaggtttggaacaactgcgcgctaggctggtggatcgtcgcgaggacagcctggccgtgatctgcaagtcttcggagaaattgacaaatagtccaagagctttgagagtccagaccgctggtaggttcgtcgaggaagataagcagggtaggtttcgcagcaagttcaacaccaatgctaagcagcttcctttgctcgacgttgaggccctctcccaggcttcccaccaccgcttcggcgaaatcttccatgccaaggactttgatgacttgttcgacgtactcatacttctcatgcttggtaaccttctggggctgacgaagcatagcactgaaacgcaaagcttccctcacagtggtggtatcaagatgaagatcttgttgttgcacatatccagtccgacgggggaagtttgccgcaagggtcttgccgttcacgaatatatcaccagagacaacaccgatagagactctctgcgcaaggacatcaagaagcgttgtctttccagctccagaaacacccatcaaggcagtcaggctaccaggcttgacccagccattgacgttgtccaagagtcgtcgggtgccctccttcacggggatatcgtagttgagggagttccatgacagaatgtccttttgctcgggtaaacggatggtatcattggtcatctggagctcgagcttattgacctcctggattccaagctcgatgctgtgaccttcctgcagatacttgggcgcatgtccagggcggaaaaccagcgcctcagcctttgacttgtcatcagtaaggtactctgtcgcaaccaagtaaagtgtattgagggcgataaaaaagccgatgagaattccgtagttccgccacaaatgagagtgcttgtactcgtagtttgcttcaatgaaagcatccccagatacagttcgttgaccggcgactgcaccgacagtggagcagataaaggacgtcccagttccataactcgggatgaatgcggaacagtcaaatgttcgaccatggaattcattggccacgagcgcttcgaatgtatagtagatcgggctgatccaccggatccacgaaagccaaggatgcatatatggctgtgggagagtaaatccggtatagacgacaatgcagagcacaagcacaccggcaatcgccatggcctgcccaacagatttggtcaaggcaccgacactgcggaacaagccagacatggccagaactgcagtgagcaagaataggtagtggatgaagaaagctcccgcttcacggcgcaggtttgccataaagtagaggaccactgtgaagattgagattcgtatgatcttgatcggtaaatcgatgatgagactggctagtgcttcagtgaacgggtggacaaatgcatacccagcttgcttttcgacaacggggcgctgggcatagagttggaggatttcgttgatcgtaagaatggcattcatgagcacagcaaagtacatcactgcacccttttgaaagaagaaattgggggtatcaggagtattgtagaagatggatccaatgatcagagatagaatgatctgaacaataaccggtgccatggctgttggaagatcttgaagcattcgctggtaggctctgtgtatgcacagccgtacctgcatagggatggagagaagaaaagggctacgagctcgagtgtggcgagcttgctgctctttgtggctttccatgagtcttttcttttcgtcgacatttgggtgatgttcacgttcgaattcggaaatttccttgtgtaagagctggtactccgggctatttttccaatactcggaaaactccttcgctgtgcgggggaccttgccttccatgccaggccgtgccgtgcgttctgctgggttggtgattgcagtcaaaaagtcaccactgacttggcgctcaagtctctgccatcccatgtcttggaaataggaaactgcacgctctctgggtccataatagatctggtatccttcgtatagaagaaccaccttgtcgaaaagatcatacatcgactgtgatgcttggtaggcggcaatggcatggcaggattgccccatatcagccgaaaggcgcaatgatctcacgaatttcagggcagatgcggcatctagaccacgggtgctgttgtcccatgctccgatgcgacagcgagacaagaacatctcggcaatactgactcgctttctctcgcctccgctgacacctcgtacaaaattgttgcccaccttggtgttgtagacgtgggacaatccaaagacggacaggacaacctgagtgattgtctcaacgtattcattgcgggtcacacccttcaggcgttgttggggtgcacgagcatgggcggcgaatgtgagggtctgacctacggtcaagtggggaaaatgtaggtcgacctccttgttgtatgcgacatctcctcggtgatgtttgatcatatcttcaaatgcgattcctttgtaatggattgaactttcaggccccacggtcaaacccccaaggtgtccgcagatagtcttcaggaatgtcgtacatccacttccaggtcgacccagtacaagaaggagctctcctccctggagtaagccatcgaagttgcggagaatttgtcttggtggtgaggtatgcccagtcaaagctctggttgcagctcggaaggggactctcaaactggaagtgagggtttcctggtattgtagagcggagccagagccatgtatggatagattggagaataccacgccttgattgaggatatcgatgcctgaatcgttgacctgctccagtaccatttgcgcccatcggcgatgatcgaatcggggattggtgggatcgaggtatggggggataccttcttttgtgctggccgatcttgaaagctgttggccgattttgctagaggcaatgcgagtcaaggtctgttgttctcgctcctctagtatagttccagtgcgttccgtgattggagcgaactcgggatcaccatagtcctccatggcgaggaatggaccaatgtgtatgtttgtgtataattttgagctcctgggagcatcgggcatgcccaacccttttaatcaaatcatctcatcggtaaacggacaacgaagccaccgaagtatccatatttatttcatcgggttggaggctttccgatgtataacggagggacggactccgtttcaccgaaagcttctactattctagttattctagtggagctcaggtatacccatagcctataggtacctgcctattattagtattgagaagttttctcgtctgatcgatgattctcattgaaaagagatacggcagaaatataaaaaagccggtttggttgcatcatactgcattgcatgcctgtcaaatatctacaagtcacctgcgcctccgttcagaatctcattattattatactccgagctccgtacggagtacacggatagatattatcttcaaatactccaattcaggttttgaaacggtttacgacgacaataattgagtctgagtggagcctcgctgaatatccatcccgaccccgagcgtaaaggaggtatcggcgattaggggtgtcccttatctccatggtctttttgtagtgtttgcaatgtttgcagtgtttgtagtgtttgtagtgtctgtcatgcttgcatcttggcttgtagccttaatcctcagacatcatttcgtcacccagcgctagactagatcgttgcttgatatgaataagaatctacttgtttaaaatggacaattacttacctccctgactatcgagtgcaatcaagtattctggagttgccaatgcttattttatatcagtgctaaaactcttttgatgactattcttcataatcacccagtccgcgaatgactggtaggtcactgtatgattgcatctgttgactgcgtccaaaggccgtcactagacacactttcagtctgcctgggacctcatgcttcgagaatttctgatacatctctgcgatgttctcgaattcgtccacatacgtgaacatccacgacgtatctagtttaccttccaccaccagatccattaagaacggataatactgcgcctggtcagtcatgaattcagaccagaagaaaagaaaacctaccttttgcggccacgtttgacctccacggactgtcagagctttctgcatcaatggcccgatcgggaaatcatgcgccgtgaaaaagaaatccccaaccaatgctacgttaccacccttacgggtcgccttgatcattgccgataatgtatcactattatccctctcaagcccaatcgcccgcatagccgaatactcaggttcctgcgaagtacgatacccactagcctcaatagactgatcaaggccgtggttctgaagcgacagaatatactccgccacgtccggatgcccatccacattaaccggaatcatgccaaagtcctctgcgatctggagtcgcgccgcatccttatccatggcatagacctttttcgccccacggagcttcgccagtcgctgcgtagcgaggccaataggcccacagccccatacccccaccacatcgccatcctgcacctcagccaattccagcgcatgccaagcggtagtcacgacgttcgtcaagcccagtagcttctgcgcatcgacatcgtccggcgcccggacacacgataagtcggcatgcggcacgcggcagtattccgcctggtcgcctggatacccgccacacagccggctgtagcccagcttcccgccgagtcggtggccgtacgtggattccgtatccggggatgggtttgtgttgtcgcagagcgaatactcctgtcgctggcaataactgcaggtgccgcatgagatgacgggtaggatgatgacccggtcaccgggtttgagggtcttaacgtccggtccgacctcttctacaatgccgagggcttcttggccgagaatgtcccctttttccattgcgtctttgagctcgccttcgtagaggtggatgtcggaaccggagatcgtgcagtgggtgatttggactatggcatcgctggggtcggtgaccttgggcttgggtacgagtcccacttcgatttttcgtgtgcccatccactgcgctgccttcatcacttccgtggggtgcggcgtgtatgccgtgctgcgttgtattagattgaggctggctgtgtgcggaggcatttcttacctgggcattatggccgccatagttgtgagtagtagtcaattgccaactcgaaaaatattagttcgaatgagtatcgaggggacttattgactggctgttgatactgtcgacgtatagtcgtttgctccaattgttgaagattgagctatggtagacttggagcaatggcaaattaacatcaagatgatgccaccaggagtggccagaaagtcatagagttgccatgaatggtcatctgatttctcggtcctatggtttttcagaagacatatccgagccggaaactaaggccggctatcaacacctaacggttaaggcaaagatcagtatagagtcaataacattgcagttagggtatctcgatctcaactggctttaaccacactatttaaatttaaaagtacatttgttcagcattggttcaatctcatacatacactggtgagaacaatgtacaggatcatttcgatgttggcagggataacaagtcaatgcatcgtattcatgcgaaaagaaaataggatatcttaaaaagaagaaccggcatctttattcgcccgctgagcaaaggacttgggcagtttggttaactggccgctggccataatgtcccccgaatcactctcgctcctgctatcatcgccagactcagatttgccggagctaggcacctcgtatacattactggggcgatctcgggcagacttcggctcaggtcgcagcttagcagccatttcctgttgttggctgctaaggatatccttgagtgttggattcgttttctttgcaacaactgcccgaggtgtggacttttgcgcctccagcttctgttcacaggctttcagttcattacgcaagggttcaagtcggtcgcggagcgactttcgcttaaccattgcgagcctagagttggctaatttctgcaagagttcctgcatctcagttaaaatgaaagtaagctggggatcaaaggctttcccaagcttgcgctttatttcttcttcctcctccctttcctttttcttttgttttgtctcctcggccctagactgtgccttagccttcttttcgatctcaatttcccgggtcaactggtcgatatcaacgccgagcgggtagaccacttgactactggatggtatttcctgaacatgcccggaagcgggtttgggtgtttggttatcgttattggtcttaggcgtgacttggctaaatttggaggtcgaaggtgttcccggagtagatttagcattgggcgtgggcgtctgtagagtagactttgccttatgtgtagccttccgtgggctagggttgttggtaatggaggtggatgtgctgatcgcagtctcgcgcggagtggagcgtggagcaggattcaagctagaagcaagttcctctccttcggcgaaagacacggatcgcctctccgttgccggggaatccttaccacggatagcggattgcagcttttttgttctggcaatcgcaggggtatgtttgttaacagcagtcaaagaagactcatcagtaacagaaactttgccacttgggaaaagcggcccaccgagtgactgctgggtaggtgttacgtttgaatcctgtaggctgacgggctgcttgctaggagggctctgcgtaattcccagcccaattccagatcgaggaggcttaggaggcgctttgttctcctctcgaacactggcttgtcgagctggactcgagaaagaaggcgcacgggatcgtctgcgaagtggactcgtttgggcaggtggcggtttcgatggggactgccgagcctgttcagaggccacaatggccgcgggcacggacacaggaggggtagatgttggccgcgtcgagggatgggcctgtccttggcgagcttctttgaccgacgttggctcttcggaggcctgctttcgcttgcgagatcgattctcatgggttgtaccatttgttgttgacatcgcgagatccagatctgaggactggaagctcccgggtatcacaggctcttccatctgtgaatcgccctctagatcaatcacatccccagtgatcggattcgagttatcaatttgagacgtgataggtccattctcttcgctggcatcagagtccgagtcagactcggactcagagctatcagagctatcagaactatcagagctatcagagctatcagagctatcagaactatcagagttatcagagctatcagaagtgtcagaagtgtcagagatagtctgatatcctgttttcctctgatcctgctcggcgttcttctttttctccgcttcgaccttgtcatcctcgctgtcactctccccttcgtccgactcctcactagaggtctcgatcacagtttccgcttgagatttctgcgggtgggatacaatcttagccattgtcgccagatgcccttgtgcgttgactccattggtcatgtccgacttggatggtattttcacgttacgttgcggagcagactctggtgccacgtcactcgagctcgcggtagcttccttggtagattgtgtttgttggtgggggatgatatggttaggcgcagacgacatgggtggggattcagcgtcgtcagggatttgcgtgattgttcgcttagctgtactactcgcaatgggtaactttacgagcttttgcggattaggttgcagtggtgacccagcagctacaggtgcagctgtaggctgggatctggcgctggatgctcgtcgttcggctggtgatggagactcgcccagctcctcactttcgtgcctgggaggcggcgttccagcaattgtagggcctacagacttcgctggtagctgaggggtagagcggttgccggtttcaacagaagaaagaggtaaatcgcgattgcggtgctcaacaggtgacttccgagctgaggcacgagggagattattgggcgatccaggcgaatgttcccattgcatttgatcctgggaaagatattgagagtgaccgcgcgagggttggccgttgctctcctcatcttcttcctggatggcagggaattgggcttccatggcttccttcttagcctccatggcgcgcttgcgtttgtaggcaacaatagcagcatcccaatcctgctcgacagaggggaatcgctccggggcagccgcggcaggcttttgaagaacgcgaacggagccacgctggtcaaggccatcggcgcgagctttcccgtagtcgacccagacatcagcaacagtcaagtcgggataaagatcgaggtcctcctttgtatcgtcgagaatcttcttaatcgaaagcgatctatcaaccaacaacaatgttagcaaccaaatttcgacagactagataagtttctcatcaagtatatgaacactcactccagctctgggtggagctttccccaatgctcttgaatcatgtccgcaagtccaccgagcgaaacctcttcagggtgctcaaggacaagcaagaagacaccgggtttcttcaatgtcggttcctggttggagacattgttggtagtctttcgtgcgccagggaaggtcctgccgtagctggagctcgagttcagctgatccggcgggaagactttaattgagagtcggaggaacaccattgcgccagataatagaataggcagtagatgaatatgcagctaatggttgtgattggagcaatggcgcgtgagggagggaggtcaataaaagccggtagagctggggaggggcaattaatggtagggagcaaattagcaaagacaaatttatcagacacacatgtcctctcaaagagacaaggtgccaaacaccaaacggaatggtgcagggtgagtgggtgggagggagaagaaaagcggaagaaactgacgcgaagtagtaattgtccagctccacttaactagtgtactagttatctgccgtgactatctataaaacacatctgctaatttaaatgagaagagcaagaagataataattcatggatactaggctattgttcgttgtatcctaaagtcctgtctataatctaaggttacgggttcctgcgcagttccatacaatatagatgaacagtacagacacaaattcttgtagtattttcatatatgatttttaaataatgtctctagagatggatctattccggaggcacaaaatacctccggaagcgatcattgtgagctaaatccagctcaacaatgaccgaatgacagctcatcaacagacttgggaacctgtatgtccagaaattgagatatccttcaggcaagccaccaatattatccttaagatgatcaggcatatcgttgtagtgattgcgcttgttgcggagagccctcaggagatccagcatccgccccccggtatatttgcgctgcttgccgagattgtctttgaaatcccgcggcaatgagcgcaggaaatccatgtcgggacccattactcgcttggccactgattccaaacaaagcagtgcgtctgatggaggctcgcggggctcaaattcgaagtggtcagatacatcacaaaggaaggcgagacggtctgatgggggccagaagaacgggtgcattaatacagcgcttgcatcaggactagaaattcatgttagtaagttgggtatgtttccgcaaagaagagtgcttaccgttgccgagggtctagagacagcattgagcggatcagatcatccgcctcgaaagcgtagtcgcctaggcggcttaattcttccaaatcgaattggcccttgacgatgtttgcttcacgcatgaacttgccatttttgtcgaatgggtggctgccacgagtcaagacgtagtagaacacacaacccagcgagaaaatgtcaatggcccgagtggcgcggcggttggtctgcgggtccaccacagccggctccgaagactcggtatgctgggatgcaagagatatagggccgtcatcatccaccaggagctcgggggcacgccagccggaagttccagcggcgtgagcagtggttgcccggaacgagctttggttgtcttcgagtttcttgcacaagccaaaatccgagatgaggagacgcaatgaccgcgaaacagtgcggccacggggcatagccacgaggatgttctgcggcttcaaatcacggtggacgatcttcaaagagtgcaagtaacggacaccctgtgtaatctgccgcagtacgtctggcagatctaagccggcttgaactagttccgggtagctagcaggacgctcaatcacatcctgaagagacgctggacaaagctcgaggccaatatacaggaacccggtggcttgttcacggcagaagtatcggatcacgttgtggtggtcatcgctttcctgcaataggcccacttcatgggacgcaatgtcatagaattccatcaacatacgcttgaccgcgacgtctcgtccgtcgaacgaaccgcggtaaaccacagtgccatggctgccatgtccaagcacaacatcagtgaaaacccgaagccggcctatgcgaaccacgccatccatctctataatctcgttcgagatcgtcctggtcatctgtgcatcggtttcaagtcgaggctggggggctagggtgttgacttgttcggcggcctgatcggctccttcggggccatcaccctcactgccaggcttcttgcgacggcggtgtgcctttcctcctcgagatccacgatagcgggtttttttctttggctttccaggctcatcggcatcctcgtcaccaggcccacgtgacggctcgcgaatctgcacccggagggtggaatctggattgtattctcgggaagcacggggggttaatgcgccctccggtgatgcatcctctaaatctaagtccactgtgacgtttggaacttcctgggttggtgtagatgaacgcttgatatccggggcaccgccgacaagaggtgtggaaggggtcgagagagaaggcttatcattcgagttgatgatattcttgatgtccaacttctgctttgccaaatcgcgaatgtgatgcgagttgaagtaaatgaaggtgcagatgaacagtaaaatcaacgtcacgacaatatccaaagcattgtcccagctcttgcgaatgatggcgctattgcgcaaggcgggaggcaaagccagctcagaagggctgcgaaggatatctcgtggtgtgtcattggaaagttcagaggtggacgatccggcgattctaggaatatttggccggattatacgagggccagtgagagagtgaacaccggccaacgcattccgctgctgacgcgcactcagactcataagcgcttgcccccggcggaagaagtctttgtcatagcattgagccattggagcccggcccgtggctaggggataggtttcctccgaaaaggcataccagccccccgcctcagtgcaatcgatgtatacacgcatgtccctttcctcgttaagggatccataatctggatccggtggctggctgggttgtgagagcaggactagcggggtcgaggcatctggtgtatctttgttggcaggacgaaccacgtcaaagactcgcgccacaggagatgaaaagcgctgggtatagcgaggccgacccatgcgcgagtgatcgaatcccagtacaacgccatcatgcatactgtaaatgtgactttcatccatcgtcctgtagtactggctttgtaggtccatatcacgattgtttggtgcccactcggagtacttcaaggtacaaattggatctcccgtctccgtgttttgtatggcaacggcatattcaacccgaccaagaaccaaagtgccagatgtcgactcgcattcatcagattccaaatcttctccgtccaccttccgacattcaggtgcagcggtaattggaccacgggaactaaacacccgcaggatgctgccagtccgggcgtcaatcgtatacaatgtagtttccttccgggcagtataggtcacggcggggtcggtgccggaataaggggtttcgtcaacaagctgcttcactgttaagccgagcttttgcaagccggcatctggggcggggctgtagatatataggctgccatcctggctcggctcgacgatccacaaaaagtcgtcttccggttctgtatcgtcaaaactggaacgattcgctcggtggtagatgctttcgaccacaggactgctcgggacctcgagggcccagcgagcagtcccggtcttacgatcacgggcgtgaatggttccgtcgacggtcgccagcagcacaaaatcctcaacctcccagtcctgcaaggaccgcgcgtgaagctgcgaagccaaaccagcagcagtgctgctggcttggacaggaggggctcgaacggcgcggccggagcctgccagagccagagtagcaagggcgctcgcatcgttgggtttcacgatgggtggtgcggctacatgggccgcattttgtctagatgactcttgtgctagtggcacagagacgcgagatatagggtcatgggcatctgattgctgcagcggagcgaccagagctgggagaagaaggagtgcgacactggcggggagtgtcgaacggacgcccggcagccgccaccgcatcgtagagctgtcagcacaaagattgaatagtagatgaacgatcgagggagcgaagcgggtaggggcgtctcatgggccgatgtgaaagggaagaggtttaatggatcgagtgatagtgtggagcgagtcgagtatccgggtagcggatcatcccccaacccacaaatgatcgaaatggaaaatggcaggaaattcagtctaatgataatgcatgaagagatggatggaactgtcgaggatgccacaatattgaagagatgaaaggatgaaaggagagaggttggagagcaggcagagagattgtgtgtaatacacgtgtacattacaggctgtcaccaggatttcccgcctccactgctgtaacggtaatgtacggtactttgtccacgcacgccttcgatctacactcaatacagcgtagcctagaacaataagaacattcgagagccccttgataggcgtaatccatataacgtatgttgtatacgtgcttatagatgtgacatagaaccctctatgttttgtaccagtcatccttacatacccggttcttgcttactgcgtactaattatggattgatcatttgggacgagtctgtcagcgtggatcttcacatgctaatgacgaagattgaagcctttgagcaaggtgggtcaccctgcgcagcgtcagggggctaagaccaatcaagggcgagacagcacactacgttcaagggtctcatgaagaaagaatcagtccattaccaccaaagatttttttttaaaaaaaagaactatgtaaatcaaagcagcacatccaacgccacaaccccgtcttcgtgcagtacacgccggaagtgccagtgaaggggagggaaaaaaaaaagaaataagaaaagggaaacacaagaaagatcaagataaatacaggtgtagagggatgtggccacagaagcatgtggagagaaagggactataaaacaaaaaaaaagggatatcggatgttcccaagaaagaaaagatggtagatattaagcgtgagacgaccttaaccgccgcggatcatccaggtcacagcaacagcccagccactgacgaagatgacggtcaagatgcctgcacctgcacggtcaccggtaccgatggtattcaatacagggacatcattgtccgaagtattagtgccagcggtcgggttactcttggaagttccacctgatgttaaactcaatggcgccttgttcttgaacggaatcagattggcagccaggacacccagcacagccatctgttgctccagacctttggtcccgtcccaagcggcttgcttgtaccagcgaataccacaatgtacaccgtcatcaccacccgagcattgctttgcagcggcctgggctgaggttctcagctgagggaagatcaagtcgtaggtgtcggggacgattgtagtcaacattccaagccagttggcgaaataggccttgaaggtaatttggttgcgatcacaattaccgccggcttcgcaggtgatctcgcaaagaatttggccaccgtctccattaaatcctgtggtcgggtagaactgctgggaggtcttgatgaggcccacaacaccatccttccatttcgtttcagtgccattagtctagtccgaggttagtatcaaccattcttaggcagcaagacaggacatacgtagttgtgcatgtaggcggcaccactgatataggtggcatagttgtaggtccactggtaatcgccatgatccgtgcactgcgtgccgcaggtggtagtatcggcgatgttccagttcttctccttgagcagcggggtggtagcactccaatcccaaatgcgttcagcccagtcagcatatgtcttatttccggtgtagagggcgaggcgggccgaaagttggaacagtcctccgttcgaaatcgcgttcttcgtaaggtaaccatcctggtacggccaaatctgccagcgcataccaccgtggcagctgctcgtatcccatcgggggtactgggtgttgaagacaccctgtgcgagagatacccaggatggttcgccatctctttcagggtagttgaattccgcggcggtaatagcagcgagaccccaaaagacctgatcgtcgttgcccaggtactgactatagttgctcgggaagaaattgtcgtcacccttctggaaatacattccgtcctgaacggcgtcgttgaactggctgtccccggacacgaaccagtacatgataagggtcatgaacatggaaccgccctcccaccaagtgccatcgaatttaccagggatgtccttggagtcgcgagcattgtagaaatccatcatcgtggtggcgactgttttggccgcatttttcagggaggctgagagaagttactgaattagataatgaatgcgatcgaagggggggagaacgtactctcgtcatcgaggttcacatcgatagcgagggcaccctggacggcgaacgcgccacccagtagagtggccagccacttggacaaaatcatatgtgggatctcaaacgagcgtaaaagccagtggcataagggagttgaatcaaggaaatagaagtttggagagaaagtaaaggtggctaagaaaagatgacggggtaaccggcagcccgggggttacagtccctggtacagtgggctggctccgtctaagaatgttgagttattttaacttccacaagtatgaacattcttacgattattatattctatagattctatgcattttatatattgaatctacattctgcacttcacctctaacaataggaagtatagaattaccaaattgctgaattgctggtcgactgtccctgaacctaaaacgatgacggttagactcagttcctggcggcaaatctggccctgcagtaacgaaatgaaacattaagcttagcgagacaaccccttgatatttgcaattgatcatggtgtacctacaaagtacaacgtgttttgaccagacaatgtcgatctctaactgcacgaggatatattactataaagaatcaaaagcggacaattgccttggctaagggtccgaactgaagtcaccgctttgagtctgccgcttcgggaaccggtgccttattgttcaggtccagcccgaaaggcacatcaacaagacgtaaggtgtatactttaaaccttggaatagttcatatgagtatgagagttgtgctcaccatatgcaggcctgttgtagggttcccttaactctctcgatgatagactttacaatagtgagaccgtggtcatatctagggtgtaatatatctacttggcagactacaaaaatggctagatggatagatcatgtacttagttgacttctattgcacatttttttagttccttcatagaaagactatagagatgaattcatccatgtcatcagaatcgtgtccattacatccggttacgttggcgaggagccgcacggatgatgttgtccacccgcaggagaagctaaataaagtcagcgcgtattccccatagaaataaaaaacaggtgagtgacatacctcggctgcctctgaggcagacgaaaccaccgccttcttcaacttataagcctccaccacaccaagctcacgcatatctgcaataccaccaccgggcgtcaacaggtcaagaccggagctggtcataccgttgttgatggccgagcgcagacgagtcaccagatcgctggaatccagaccagcgttgtcggccagaatggtaggcagctgcttcaaagcgtgagagaacgagtcgacagcaagctgtttcttgccggtcgtattctgagccgcctgttccacggccttggacatcaccatctcggcgcagccgccgccaagtgtcacacggggatccttgacggtctgcgagagaacggccagagcatcgtggagcgaacgctcggcctcgtcgagaagctgctcggtagcaccgcgcagcacaatggtgcaggcctgaccagcagccacaccggagaacttgatcagggtatcctcaccaatgatcacttcctcgatcagatcacacgcacccagcttgacctgatcggggtggtcgaaggtggaagcgatctcaccgccagtaacaagggccaggcgctcgatgccgtcgaaatcggcgtgctcgatggacatgatacccgcctcggtgaacagctgctcgggccagttgtaaatgagctgacggttaacgaagcagttaataccgtgtgccttgatgcgctcaaccttttggcgcatcttctcgcgttctgccttctccaactcggcaagcttgccggtcgactcgaccttgactcgtgcgccgaaaatcttgaccttatctgtgtccatggctgtattggcgaccaagatcttggcgttctccaaccgcttgggctgattcacaccgaccttcttgtccataatgaaaccctcatcgaggtatgaatcgctcagctttccaccggccttcttgataatctggatgtgagagaggtcggtggatcccttgagacgcagaacggcctcgcaagccaacttggcgaattggtcccgatcttgcgacagaaccttggagctgagcgttgtgcgggcaatggcgtgcaagtccttacggaaagcctcggggtcagtgctgcggtcgaccgccgtagcctcgagcgcggcgagagcagccttgctagctatccggtaaccctcgataatagtctgggggtgaatcttcttggcaacaagttgttcggcctcacgcaacaactcggcggccagaacggtaactgatgtggttccatcacccacctcatcgtcctgcaccttagagatattgaccagaaccttagccgcagcgttatccaaagcgatggacttaagaatcgtagcaccgtcgttcgtcaccaggatttctcctgtcgacctgtgagaacagccatgtcagtaattccggggttatatcaaatgatcatcgacaactccaccacatacgcagattgtaggattttgtccattcccttgggaccaagtgtgctcttcacaaggtctccgacggcgatagcaccgacaaaagctgagagacgggcattttcgcccttctcttcgatgacatcgtcaccaaagatctgtgtgggattgccaaaagatgcctaggaggggtagaggtgagccagtgcgaacacatattttccacgctctagcgagttgggaatagcgtaccataatgaccagctgaataaggcaatcgaccaaagatcaaatgtcttgctggagaggttgaatcgacttctcctgtcaacaagtggggtgggaaaggagaaaagttgccgcacgattggcccgagcttctgattggctgcactccatcaccgcctgcgatacctctagacgattcctttcttgtcgtgacgatccctttcgctgggattgaccttgtttctgtcagtgtcgacaatggctgactctggcaaactcgctccggctgctgcgaacaagcggcctcattctgctgtcgaggctgagaacagtgagtcccctgcctcatggacaccgttcagaccgctccctcgaacggaacgcaagagatactaactgtatgcgattgttaggtggtgactcttctgacgatgatttcggccctgcgctgccctcggaggtcgccccaaagaagaagcggcgcaagcttccttttgagaaagtctacatcaatgctctaccagtctccgcacggtactccaagtcccttatgcacaaggaccaattgtcgtttgtgacggttgccccctatacggactttgtgatcacttcctccgtcgatggatatgtcaagttctggaagaagatggcagaaggcatcgagttcgtgaaggaattccttgctcacccaggcgagattcggggcgtatctgtcagcgccgacggccgcagtttcgcaacagcgggaatagacaagacagtgaagattttcgatgttattacatttggtaggttcaataattgttgctctcccggtctaatgacttactaacatggacagatctcttggcgatgtatacactagactttgtacctcgatgtgtttgctgggtacacccgcgtggggcctcgctgcccctgctagccgtaacagacgagtcaagtaatacgattcaagtattcgatggacgtggcgaaaatcccgaacctttgcacactttgaagtcgatccaccgcagcccggtggtttcgctggcattcaacaacgccttcgactgtgtcgtctcagccgatgaaacaggaatgatcgaatattggagagccggagacggatctttcgagaaacccgacaatgtcttcgacttcaaatcctcaacaaatctcttcgcatttaagaaagccaaatccgttccgacagccatcacaatctccccatccggcaaacacttcgccacggtctccttcccagaccgacagattcgagtattcgacttcgcaacagggaagctttaccgcacatacgacgaatcaataaccaccatcacggagatgcagcaagccggcacagcaccgtacgaactggacgaagtagagttcgggcgccgcctaggtgttgagcgcgaactggaaaacgaaggaacgcgcaacaaagtaaacgtttctttcgacgaatccggccacttcctcctctatggctctctttacggcgtgaaatgtatcaacacctacacaaaccgcgtagtccgcgtctacggccgcgaggagccattccgagccctgaatctcgcattgtatcaaggacaaccgcaacggaaaggcatcgtgaccgtctcaatggcagccagtagcaacccgctcctccagcaagccgaagaacgtgacccaatcctcctctgcaccggcttcgccaaggtgcgcttctacatgttcacgaacgaaacagacatctcgaaatccactcgggacgtccaaaacgaaaagccaacccaatcagcggccggcactggtccaaccgccaccaaaacggccgagaccggcactgctgcaatcctgcacacaactttcggcgatatccacctgcgcctatatccctcggctgcgccacgggccgtggagaactttgtcacacacgcccggaatggctattacaataacacgatcttccaccgtgtgattcgcaaattcatgatccaaggtggtgacccgcaaggcgacgggacgggtggagagtctatctggggcggggaatttgccgacgagttctccgttctcaagcacgataagccgtatacgctctcgatggccaatgccgggcctaataccaacgctagtcagttcttcatcaccacggagaagacgccgtggctggataataagcacactgtctttggacgtgcggtgcagggcttggatatcgtgcataagatcgaaaatgtgcggacgcataaggagaagccggaggttgatattaagatagttagtattagtatctcgtgatatatcggcccgggtggaatctaggcgttgtattacaaaatatgtgtataaggaatcatgaaatgcccgcgtgcgttgtactatgtacacagtcacttggtcagacaggttgaaaaaaaatggcgaatatgaccgtagaaagagaatcgacacagtcgtcggcagaagtcgactccgcctatttttaggacaaaagcccaagaaaagaaaggaaggaaaagaaagagagagaaaaggggcgcaaaaccaacaagaacaaaaacacagcatgaagcccattatccgcaccaaacaccaagaaatgcaaccatggccaggtagcatggtatagaagtagcgcattgcgaaaacaaaaaaaaaatcaaggacaagaaaaggacataagaaacccaaagatccaaaataagaagtgaaccaaaacagattttaaacctgccgaatctccaaatccccagagctctggtcgacctttgtcaatcgcgtgcgagccccaggcaccggggtgctagtcttcgccatcgtagagcgcgagctactagccaaggagtcggcaccaagggcggtggtctgcaccggcaccgggacagcccaggcggcatcgcgcggaccgggcggggaagcagcagtcaagaagctgctgccgccaccgtggtagagattgggccgtttagcatcgtagcggcgcttgaaccatacgccgagtacggcgatggtgctaaacccgatgaccagcacgatgagcatgatgatccagcggtagtgggtactccacctatttaggggggatttatttagtgattggtctggatggtgcagttacgattctaatttgcgctgcggtgttggggatcaaacataccatgacttcttcgtgtccgctgtggaggttgtgtttgtggttgcgctggaggtggaagtcgaagtagaggttgcgtcggttgaggatttggttgtggtggtggcagtgccggttgtatccttgccgccggagttgcagtagtcgacgtaccaggttgagagagtggtttggtctgcggcgctgcaggaggggcagatgctgccggaggttttgaggccggtgagtagggatgactggcagaagcatgaggtccaggtggaggcttcgcctgattcacaggaggtctgcgcgcttgtcagggtggtgcaagtcaggccgcattgcgggaatttgctggaggctgctgcggggaggatggtgtcggcggctaaggctgagattgtgagggcgataagggcgaggaagaggaatgagaggcgcgtagtgagtgacatggtgagagtgatgttttcgagttctctattttaatgaggggtgagtagcgaatgtggaagtgagagccgtccctgaggctcgattagatgtctggataggatgtcttagtccattgttgcataggtgaaagagagaagagtcgcccgaaagaccaggaaaacgagacgaagatggttttgggtctagtcggggcccgaacgattccggattcggctttttggtctttttctttgattttttatggctctcgaggggaaatccgcgggtttgattggtcggatcggtttggttaatttcttttgcttctttaatctcttttaattaccttataaagtagtatcgtagtactgtagtactgtacctgtacatggcatcgcatgcgttttttaatttccgcaaacggaccgtggaaacctcacattctaccttgtcgcattctgacgtctgccaggtccgatattaggttaatgctcggctggttctcaaggttagtttctatggaatgagctattggcgctaactacttcctatgcaaggagtaactatatgtatattctgctgctgtacggagtacaatgtgcgatgtactcgaagtagttatataggatcgagttatttacttgcctattcccttctaatataatttactaacctgtaactcatccgtctttcattaactccaaacaagggcccaccacgatcggcagtcgatacttggaataatgcgatgaatctgcggttaatcgtacaggtacttagctagatacggagcagagaggtttcattgtctttgtggtatactgatcgtctcgttgaggcttgaaagatcagcactagggtgatattccaccgaaaaattctttaactgtatctagaatctaggaccagttattaggggctttattaccgaagggaaggactggcggtagaccttttaggtaatcgcgaatcctagttaactaactaactaactactcgataatctctgaggtaagggaattaccgagcctatattagaaaatatgaagaactacggtagtaaccctctcggactcactggcttatctggccctcttcaccttttgcacatttcttgctagtagaagaacgaggctgataaagagactatctacacgtttgtcaacaataccatagagaaggtcattgccgaggctaagagcgtcggagtcttcaatgaatatgtctatatgaactacgccagcatgtcccaggatgctgtcgctggatatggtgctgctaacaaggctcagctgaagaatattgccaagaagtacgaccccagggaggtctaccaaaagctgacacccttccaccttcacttcttagcagtcaccccatggtattctcctctctagcaccctactactcccagtgatgactctgctctcacacctgtttcgcaggcaggcatgtcggtgcccctgtcccccgcggcagggtcccctcttcagtattattatatacaggaggctaaatcttttttatctttttttcttaacttttacttttcttcctacatttaatcattcggttagatgcaatgatctgagtctgcatccagactcgcttgtaatcacggcagccatgtcctaaacactgcgggcttttagaagaagacaggctgatggtgtgtttattgcgcggatcggcgaacttttcacgacaggcccaagatcgtccgggattgaggggttgcgggtccggatgataagtcgctctgtgattcgctcgctctggatgtcgagaaatcgctcgggaatatgctcttatatactttgttaattccgacggatttaggagatatgtcgccgtcaaggttctattgtatatcataaaagggcttgtcaaatatagttatgaacccagactcttttagctgaatcatcctatcataaacaaaccctcaaaatggcaccgaagttcaccaaactccgccctttaggcaagaatggtcccctagtgccagccattggatatggtatgatggtcatgacgtctcctagctacggggcttcgcttgaagatgaccagcgtttggccctgcttgatcgtgcagtcgaaattggggcaaccttttgggacacggccgagtgagtattccgttcaaagtcatatcgttttaatgtctctgacaaagcaacagtatgtatggtgacaatgagaagcttttggctcaatggttcaaaaggtctgggaagcgcgaccagatctttcttgcatcaaaatttggatatgtcaaaggtagccatacgttggaaatcgacacatctgctgcctataccaagaaagcttgctactccaccttggagaacctaggcattgaatatttggacctttgtacgtgttgaactatgcaatctgcattcgatatatcataacttctccataatagctaacgcggccttagactatgtccacaacgtggataaagttactcctattgaagagaccatgcgcgctctcgtggaattacaggcgtaaggcaagccatacccccaatcaaaactaggtattgactgagcatttcagcgaaggcaagatcaagcacatcgggctatcggtagtttcctccagcactattcgccgggcggctaaaatagcccctattaccgcctaccaacccggctactcacttttcgagcgtctgatcgaaggccctgaaggaacccatgcactagccacgtgccgcgagctcgggattgcaatcgtgtgcgcgacgcctctgggccgaggcattctcacttccgggttcagtcagggtaaagcaattggtgccgaggcggatatacgtgagaagatgatgccgcagttccaggatggtgctaaagagcacaatgcggacttggcgaggcagatcaagattgttgccgacagaaagggatgcagcttgtctcaattggcgcttgcttggctacttaagcagggtgacgatatttttcccattcccggtactaagagaatcaagtatttagaggataatatgggggctctcgatgtcaatcttaccgatgaagaagaagcggagattagagcgctcgtggaaaagactcctgtggttggtagttcggttcccgatgcgtttaccgggatgctctttcgcgataccaaggaagaatgaattatttatatccagacatagaatctcatatagaaccacatgcgtcagagaatacactacaacatatgtatcaggtttcgattgagaacatataataggtcctagccacctctagcggacttattgatgtgtggttatactgtaagcccccgggttatttgtgatgtatggacaagttaggcgatctacgtaaagaggccaaattagaaaaacaagcaatagcaatctcagggctagtccgtgaggaaatctcggagatgattggataacagctccacctattattcctcccccgcattccctcccttctccaaccctcccatcataccgacaatgccgacaatgccaacaatgccctcccggcaactcctttcaaccctaataacctccctcaccaacacccgctggaccctaacccgaactctccggagcgaaaaccccctggatctaaacggcgagcttcgcgggaccgcaaccttcaccccccaaccccccaccaccacagccgaccgcgactggctgtattgcgaagaaggcgagatccctagcaatgtcggaggccccttaccagcgggactacgttggacaaagaagtacatatggcgcctaggcagcgacagcggacacgtcagcgtctggttcgtgaaagtcgcgtcgggcccggaagaagcagactacttattccacgacttcgactttgattcgggttcgagttcgccgctagggtcggaatctgggtctgcgcagaaggatcccggcgaattcgtcgcgccgcccgtgccgcccgctgtgtcaacccccggcaatgagatggagactactgtgcttaatgctaggggcaaccatctctgtatcaacgatatgtatcgcacggcatatgcgtttcgcattgagcctgataccggggaggtgcttagctgggctagtcggcatgttgtgcgcggcccgaagaaggggcaggatattgttaatcggtacgagaaggaggcatgagataagatttaaagtaacctacaattgtgatgcttctttcatgaggctacgcggatggtcgggttgcttggaacctggaatttcccgaggtctactgaaatcacgatcgtgatgatatgtctatggatgttcatatattcccacttatatctcgatctagctccgctcttcattccacgcccattccacccctgctcacagcgtgtaaaggaaatccggtcttttgtcacccaacaactcgatctggctctggtccaagccctcgatccagtggtcgcgttcgccacgtctgcgcttgccgttctcacgccgcagcaggaggtactgcaccacggatccgccaaagaggaacaggaccaggtaggcgagtactactccgtgaccggggtagtagtttggcttatcattatcgcggtagatgttcgatgatacgatgccgttgagatttccccagccgatgataaaccctagggagacacctcgtttgtatacacctagacagctcgagttagttttggctgtggtcattcatataagaaaaaaccggaatccaggttgaaattaccttcggtgttgttactagtccatgaaatcgtgttcgcaatggctgggtagatgcccatggccccgaggaaagttcctgcatatcgagcgccggcggacttacagcctagtagcatagcgaatccaatcataccgaggaacgagacggcgatattgcagaggccacgctgtcttgtacggtctgcaatgaagcctactgccactgtcaagacggcggcggcggcatatggcggtacactcagcaactgtgcacgaatcgcgctgtagcctatagaagcatccagtcagtaaatagctccgatataccgagcgcaagagccaagcttaatattcaccctaggaaatcttgttagcttcagaatctccaatgtggcgatgtgacaactcactaattcattgataatagtaggcacgaaaagcgagaacgcataaagcgacccatcagcccccatataaatcacagccccagtataagtcttccaatccttcagactcgaccagaagtactccatcttgaactcctcatgctcagcactcgactgctgatccatagcgagtcgcctgagcacgcgcttgcgatcgggatccgacaagaaccgcgcctgatcggggaagtcatagacacaccaaaatgaggcaataccaatgaagaacgtaagaaggccttccaggatgaaaatccacgaccagcctggcttgccggccacgccgtccatcttcgcaatcgctgctgctagcagaccaccaaatgaacctgcgagcgccgccgccgagaagaaaatcgccattcgtacgccgaattctgagcgcttataccagcatgagaggaaatagcccactcctgggaatagaccggcttccgataggcctaggaaccagcggactgccatcagcccgtggtagttctttacgaagcccatgaaggtcatgcaaattccctggaattggttagaagagtaatgtgttggaagaagggaagatttcacttacccatgccatcataatgagtgggataaatacgctcggccgcatccgctttaacaggacgttggtcgcgggctcgaagaccgagtacgagacgaaaaatatagtcagtgctgcattgtattgggcattcgtcatatttagatctgtttttagaccgacgagctttgcgttgccgatatttgtccttgagcgcggtgagattagtttgtgatatttcctcggaagccagtgcgcgaataagatattgctcttttgcttaccggtcaaggaacgagacgagatacagtagactgagccatggcacgaggcggatatcgagttgccatagtagtctacgatcctatacggttcgtgatctggttagttatcgtgactttacacgatgctgaacagaaattgataacatacaatcgccgctctttcttcgtcgctcaatcctgcgtcgggatcctcaaatccagctgcagcaagcgcatccttagaatcggaaatattctcagggtcctcggaccaggattcggtttgtttgtcggaggattcaacgaccatgatgcaagatcgagcagaggccgggggatggtcaggaatgtgcgattgctctacgccgaccggcgagctatttaagaagaacagggaacaggtcaaagcagaaaaagacagccaccaagcgctatgtaaagaggggcagacatgccaacgcttatgctcggcagatggtcgagatttgccagggtccagctgaaaatggtatgatccctacatcctagcccgcgtcctaaccgcgtacaggggttgctgcattagcttgaatctggatgttggggcccgttcaggcgtgatcggcatgtagaaagtgagatcatccgtggaggcgacttcaaacgggaagaaaaggacaagtatgtttgtacgccattgtacaatatctgattcagcttgatgttgagtcttgaatcccccattttagtacatttttgatacattggataaataggccaagtctgggcatccggggaaaattagggcatcccccgcataccccgggctccactaagcgaagctttgccccggggccgtctcgatctcatcaatgttggacacatgtacggagtcctgccaagtctataacggcccgtttatttaggccgacgcggagttttgcttggaaacctgcctacgatgtgcactcggccgagagaaataggtggtgtcggccgacgtagtcgtatgaaatgttgatcgccaaaagttccctcgactatcgagccattgaccgtgtagcctctcggatccaccacagatgaccaccttttgaccatgttttcattggacgtagtgaactcgggatagtggaaggattgtctcggcattgaccttgcggcaggttcctcctccgtagccccgaagaatttgtgccaatgatcatgcagctatatgataatatagaaagcgaattctaagaggtctgatttttcactgacagccacgctaagccccgcattcaatgtgcgcacggcttcactgacgttgcggggggtgatcgtcgcacacaaagttgcgtccgcagcgcagtagtacaacatcggcccaatttgatataccatgagctgcaataggcggctcatggaacaagcgctaacttaaaagacattgttggagcgaattcgggtggtcgaacctacgctgtcgaacttttggcaacatatttgtcgtatgaagctattttagaacgctcgttatgacttgtctccggagtttaacttggattttggtagtatcattttaatttgagttattgtgaggtctaaatgtagactcccaggaaaatttacataaggtcgagtcgggctcgcaagaaaattaccttgccggtaagaccaatggagaccccaaactcatggatgtatgtacttgtaaaaaacgcgataaccgagacgctcatgatcaatgcaatgcgcccattttgccttgatgtagccactccagggttaaacccgccttccatgaggcggatatgaggcagtcgattcggagcaagtgatagtattgttgcaatacgtccccaatctatgcgtttacaaaccgtcatctcgcttaatatcgcctggacgggattctggcttcatggggttaccaaatccattgacgcgtccatggagccacttgagggtaatggtgctcagtgtcatgacagcggcactgagagtaaataggccaacacgacctgatgtgggcagtgcttcgaagatgggatatgggtacctagactgattagcgattgacgtcggaggtgctgggtcatacacgaaccatccgttctgggagaagcattgctcaatccagaaccagtagccgaaggcgatagtgccagacaatgcgagtgcagggagtgcagtgattgtccagggtggggataggagcagcaggtcaatcaacatcaccaccgacggtgttgcgtggaagctgatgtctagaaccatgttattaggggtatctcaaatgcactttttacagacgtaccggcatggacgggtataacaatatcttcgggaatcaccaaacgttcatcgatcttattttgattagaacattgtcgaattagcatcgaattacttactaaacgaagaccccagtacaaaacgctgatcacaacctcaaggggggcactacatgtcgataggatgtttttgaccaggaacagtcgccgggacaaggtaatatccgctagtagtgcaaccgcaaaagtgagtgttgacaacgatagaccaatcacggtcagatattgaaaatgccaaccatatgcttgattactgtcaaatataaagttcagcgtgctttccaatatcgaagctagacgggagcttacgctgggttagggttttcgtgcatgcttcaagaatgtcagcaagaactctaaaggacaacgtagcagacgacccatactatttgaatgaccacaaaaaactcgaaagtccggccaactagaaggcaagcccttagcgctgaaccgcgatgataagtgaaaggaccatggtacttacatgaaccaatgccgacaagccccgtgaaggactcgacatccattggagcgggtgcctatcgatcatagatttggccattttggaaaagaaattagggatacaagcgctctcaagtcctagttcaatgtcccccgaaaatgctatcagcgcgcagctcaaggaaccaatgtgcatccaaggaaccggatgctatgacgttggttcaagatacgagttcacgtgacacgcgggatcaatcggcgtctgtatcggattataacataacccggctgattcatcgttccttatctcccagggctcggctggccatgtgcttccccacacttttagtccgcgctccaaagataacctttgcctttcttctttacatcaaattgtgacttttattgcgaatctgtgctcttggcctgcccagtgaggtcagtcgactacctagtgggtcaatcgatcatattgaacagatccatcttctgtttgatatcttgtttcatcccccaaggtcgccaagaccggcactccactggttactaccggcttctcttgccttcccattgctgaagggcagtgggactggaactgtttctggcacgtctctcccatacctcgatgtgcttgtatactaggtgtgggtgtctggtcgattatcgcttcgtcgctacttggggtcaacgaggatcgaaacgcagaaagcgtgccaattctgacgtgctttcggcgtaaggagtctcgattggactgatacagacttgaaaagactgaatctgtatggccgcgggaaagtatatagtgacctttggctatttcgagccgttatcttgaattatcgccgtgtcctctttacaggcatcggtactcgaccagacaccctcgacgtgcaatgcctcgtcctagaagacctggtgcaccagaaccaaagcgccgaagtcgtaaaggatgttggtacgttactaagatgtcaataagctttaccaaggctaacagtctcattaggccatgcaaagcacgcaaggtaaaatggtaagaagcacaacccttgtatgatgctcgtgtagctaacaattatgtagtggtgaagagaaaccagcatgtcttaattgccagcgacaaggcgacccttgcgattatagtgtccgtctgaactggggaggaaggacgaaacgcatgtcaattgactcgccgaattcacaatctagtgggtatggaggagctgtaattggattttcggactcattcgctatcaacgatctgagcccagtttcgttccccactccagcaagcaacaaccctgcagatggatttatcaacactcatcccggggagttgacttcgccaagagcaatatctccaagtacatcatcacaaatgggacttttcgaatcccccaggctcggctcggactctgaaggagtgctatcgccgggccaattagagtctcgattctcctcaacttgggcggaacaatctcctccattgaccgcatcggctacctcggcgcctttgttgcaatatcaatttggacagcatagttttgatagcccatcatatctgggttcgatagatcagacatccggcctcagatcactgtctgcctttgcattccatacaaaccccgtgtcgcagccagtctcatacatgcgccaccctgtagatgtttccaaccactgctcgggtccatctatctcgcactctcgtgatgaagagcatctttctcaagggtcatatgatgaccggggcatgcatcttggcgctcggtctaggacagggcaaaacagatcctcaaacagcccgcaggatactaccggtcttatgcttttcgatccacgcagagtgtcgattgctgaaagtgatgcaatctcgtctccgaggctccacgagacaaccagcaacatgggctctgtacatgactatcacaatgggttgactccggatcatcaggcatcggcggagagcaatcatgaagccgatcaaacatcccacgagtcttcaatcgcccggagcaaatggcaaacatatctgaatagtgtaaccgacaattatggattggattctgggcgccctgatcaggatctgaccttcaacaacgaccatgccgccatagatatcaattatgcgttagacctgatcagttctcggtggcgcaacgaggagtccaaagcctctcaacctgaccccgtaccacaggtccagttttgtagtggttactatgcttcgccagtacccatcaatgtcccgaggtacttatctccgcttccgtcgtcgctgctggagaaccccatcaatctgatgtacttccatcatttcttgaatcacactgctcgaatgcttgtcccacacaactgcgataataatccgtttatttcggttttgccatcaagtgagttataccactctatgttctgttatccttcagaaagctaaccgaacagtggcaatcggtgattccaatctcctcaatttgctgcttgcatactccgctagtcatcgtgctcgctacctcggtcatcccgagcccgccaatcgaatcgctcattgggttagcaaggtcttcccaacattgcgtatggcattggagtcatccaaggaagacatcactgacagccacttggccacggccattatgctgttgtcattgaagatcgtttctccaaggacattcgaggtgccgatcacctggaagagtcacctcaagcttgctcgcgatttgttccttgcacgaagcgagggaatggcgcatcccgggaacaggattggagcgttcttcgcccgctggctaggctatctcgacacgatgggatctttgtcatgtcgccaagctggtcctccactaatgatataccactccatcttaacggcctgctccgcgcctgacggtcatgacgaattcggtgttgattgcttcactgggttcaccccccgcactggagtatttctgatccgtcttgcacagctggtgcaggaatgtgacaatcaactcttcgacgaaatgggtaatttccggcatgactggcatgcatctgcggaaatggtcctggaagcgcaatctgtacttggtgttgtcgatgggattagcgaacgtgctcatactagcccggaacatcatcatggtgttgagtcctcggatatgatagccatcgaggaagctttccggtttgcaggtctcctgcatctccatcgtcgtgtccttgggtctccgcgtgactcgtttcccgtgaaggaggttttgcgcaagctgattgatgcccttggacgtatgcgccctggtgcagctactgaagtctgctccttgttcccgctcttcacggctggttgcgaatctagagatccagttcaaaggtctcagcttttggaccggttctttgtattggagagttcgggcatgaaacaggtacgcttctatactagtctgaaattcgttgaaagagtttgctgacactgtattcactagattcaaaatgcacgtcaattgatgcaacactgctgggatgaagacctgccttgggtggccctagctagcggtcagttcctaggttagagtcgctttcggtttgaacaagtgggtggactacgttgattcgcagacgccatgtgctcatgtctggcaatgacctgagctgggatgaagcattatttagtatgaagatgtgatagattaataatacccctcgccttctaaaagagcgagatacctaccgtgcgatgcacttcatcgtttgccgtttggcggattatcctacaccttccggccttccactatatataaacgttactatcctcttcttgtgccggaaatgaatcataatgttcattctacaactgactagcttcttgcattacacaagccagaagtcgaaattgcacagagcaattagttctaacttaacttatatccctaggatatcaaatagactacagtattgtccgatatatgccaagatcgaaatctacgactccgcagcggggtgatggtgatcccccagcttctccacaccaagccagttcagccgcggcttacaatgtaggctctgttgaagaatatagccggagatggtgtataagagtgcgcacttaagatcactatatctcttgagcaagaacggtatacttcccaatagccatcatgatctccgatcccagccccattgagcttccatcttcttacgaaaaggttgaaacaaccggccatgttgttgtctctcactaccccccaggcacgccggcagtgaccccagttgtcatcgttactctgaatcgtcctgctaaacataatgcgttcaccccgcaaatggtcttggacttcgagaggctcttccccatgttcgatgtcgacgagcgcgtgaaagttgtcatcctgacaggcgcgggaaagacattttgcgctggtgcagaccttgatattggtttcggtggtggtaaaggcaggacggtagaccatcgtgatgggtaagaggacatccaccagacagcccgccgcatgctctatactcttgctaaaaaaaccccccgacacagcggtggaagagtctcactggcaatccatagatgccgcaagcccacaattgcagcaatgcaaggctcagccgtcggagtcgggatgaccatgacccttccagcaatcatccggtagatcaaccacatcccgaaaacgattccagaccccttttatttaacatacatcccttctaggattggctatgaaaaaggaaaatacggcttcgtcctcgcccgccgaggtataactctagagtcatgctcttcgtacttcctcccccgtctagtcggttactccaatgccagctacctcgtcagcacgggggcagtcttcccccctacatccaagcactttggcgacctcttcaatgagatcctccccgagccatcgcaggtcctgccgcgcgctctcgagctagccactgatattgctgagaatgtgagcccagcttcgtcgtatctcaatcgggcgcttatgtggcgcgactctggttcggcggaggctgctcatctcgtcgagtcgcgagtcatcaaccatatgtttggatcggagtaagtgagatatatatgaacaagctggttgcggatacttaatatcagacagagaccagaaggagggtgttgcggcgttctttgggaagcgaaagccgaacttcaaggctaaccttgatgataacccgccgccgagtgtgccgtggtggacagaggttgatactggccgtaggcctaaagcccaaaggccttcgaagctttaaatccaaagctgtcattggaaaggtaaataatgactgaggatagcgctttcagggttcgtttaattcacacaagaccttcgaaggatggaagtctcaacaaatgtcacgaaaaatagctataaattgaccgtgttatcaaaggtcgttcctaatacattgcaattccccagctaccaagaccgctaatgatattgtaacaaaataaacaccagcccggacaaaaaaaaaagtcaccagatgtggttttgaacagaagctccaagaggttccaccatatattgacacgaacaaaaaagaaatgctgcaatatcacaagagcgaaaagagagaaagaaagagtctacgcaatgaagttgcggcgcttgcggttgtatgccctctgatctttcagccagtttcggtagcccgccacgctaccaatcttctcgccgtagtaatcgggaacagggttggcgatggagttggttgatggatcaacacggaaccggcgaatacgatcaaagaactctttctctttctgcgcaacgaaaacaaaacacattagcacagaccagacataagtcgccactcgtttgctttgcaatgactcaccgtgttgacagagggcttgtacttcctgtacacaagtccccaaatcccatttccgagagccggtcccagaagccaaccgacagcaccgcatgcagcggtcgccaatcccaggacaacaaatgggtcgaggcccataactgtggcgccgagatgttcaaggtcctggccagacagaatctgcacaccgacagtggtgctgatagcagagctggcaactgaggagacgagagagtatcggcggcgggaagcgcggagcttgaagaaggtgtcccagtcgagcttgacttcgtcgttggcaggtgttgaggtcgaatttgcgcgcacagcaatggttgatggcaacgcagccttggcttgtggccggaagtctaggttcaatgttgcggcggccgggcgagttgtcgtggagctaagacgtgtgggctgtttggccatccgggcagttgtctggggaaggggacggagggcgctggcgagcgagggcgcagcggggtttagtcggccaaagaacatggctgtgcggatggacatgctgataggattggcgttcattttggggaggaattggaattgatctaattgcagattccttgcagaggtgaagtgagaattggagccctggccctggaggtggagccgggttatgtaagcgtaatgggcccgcctaagggcgaccgacatcatcacgatctgatctatcatctgttaaactacttgcagtagatggagattataatgggccaagattacaggagagaaattgaggacgaagagaaagattgattcttcaaaacacaatgagctatttatagccatttgaggcccggtatgtcaagtattcttcgaggctaaatatcctgtttgacagaacgcagaatcatggcagttattggtttgatgagaccaaaattgtcgaatcacggcagagcaaattggcctcccactcaaagaggagataatagctgatgtagggtatcgcactctgattgagattcgagctttttgagcctcaaagcaccacatcgaagaaacactatcgcaatgtcacttgtccctggttcaagttggatgcagcatcatgtcaagtcactagtgaggtgtagtgaataggtagccagacgatattgacgaggcgcccgagaggcaggtcagtaggctatatgcatattctttgaagatgtcgggtgtataaggtaatataggcagtgcgatatataagtgtacttttgacccggggactggcaaagagatgctatctatatttgatggttacaaagaggagtggacaggtcggagtttcacaatccacctagaaggcttagcttggtttatatacaccggttaacacaggcctagttcatgaggcagaaatggtgaacaaataagagaatgagaccatttttgtccctgaacctggaaaagaccggaagtgttgaactgtaaacaatacatggactgcttttaccaggctatagtcttttaatggccagggcatgtgtcagaatgggccgtctgccagcttggcttctactgttatattcacggaatggtgtgaaggctggtcgtccactggtcaggttgtggcgagcatatcagaattccaatcatggccagctttattccaccgagtcaatataagtctattttcctattcgattagagttctccccggatcgacatagtaagaggctgaaatggtgcgcagctcgtttaccgaatacgttatagattcagctgaataaaggtagataaggaggagagaaagaggaggagaagaaaaggaaaagagaagaaagaggggggaaggtatcacctcggcaacggatatttactcacgcgttagtcaaagggttcgtccggcgtactggttattccgtgctgaaagctttacaatacactgtatcctggggcctgaaagcggtcagtgttaaggctaacattaggccaaattaaggccaaattcaggtactaaggccacaatatactacattaaatccgaaagtaaccctggcacctatgcccctgggtagtctgggtatactccattgtaaaatattcagcaaaacccgtggaaaaatcctttgttcctggttgcacacgctaatgcagactaatggtctgagagtgttttcgtttgaccaatagccgaaatgcctcagcgatcgggctagcggcggggtttcctgcccaggtgccaatagggctgttaaaatcacttgaaatttaaaaatatcgtttcaatttcaatttcaacgctaaaatattatttcatttcaaaatcggtctatgcctcaggcatggacccactcttagtagtccaccaattagataccttaatttttcagagagccaataagattatcatagcttactctaagcctaattaggccgaatacaggctcttacctacaccgcctagtattcttcttagaccgcctacgcttatgtagcgctagtccgctagaccacgtagagtgcaatgtataggtcaaaaatatatctctggtaatctaggtaagaaaatgctccctgtagcccctatatccggccaccccgtcctacttcaggcactcttatacaaggccgaactatataccgacgacatctaattatcctaccctatatctatagaagacttacagtcaaagagtcgctctgagtaccactatcgccagtaccaccatcgctagtactaccatcgctaacactactatcgctagccctactaccgccagtaccacttcccttactactatcggtactaccggtaggactatagggactattattattatcattactctagtcgtcactcttactatcttaatggtttagcgggtttgtaaagggactgtgtcgctatacgcgaggactagcctctgaataatctatagggcggtatacacagtagaatttccttccctattgttacctaaagcgggtattacagctagcgatacctttaagtcggtcatagaaccagtctactgaggtatagttacctctatagctaggcttaagcgcgaaacgcagtcgatgctattgcctcgaaatcactaggcgtataatcgcattcttacctataacgattctactgtattcccttcggcctatcgttagtagctcgaagtacccagtatagaaggtccggaaatgccgatatatagcggataggttattgtatactatactatatatcatatcgctatcgctagtaataaccgggcagataccctagttaactttattctatttaagtattgggttcggcggtctattactagaagtaagggtaagcctaagctctctagataagactttaggcggacgttatcctacgcctaggcggagttagtagacggctagcttctaacctaggttagggtcttatactaggcctatatatattcagtatatattaggaagatataaggtttttgacttactataggtgtatccctatactggataagggtttacagcattccagactttatttgaagtaaacgcgcgataggaatagctatcggtagactagaagactagaagggctactatttttataaagataagatatacttaaacttaaagactaagaaaattttagaggacttagaggatagagattctagagtagaaaggagagggtttataactattctattaataaagaagtattccttctacccttctaagggtatttaggaatatcgctttctattaccttcctaataaagaagaggtctatatagaattctttagttctttagttctttcttatatataatactaatattataaagatactcctataataagaatctccctttattactatctaaccgtttttagactattagttataagcgactgtactaggatatttttataaaggagagttagaataatattaataacttttctaataggttgatctctaggtttaggataaagtactttaggtatcttagcgcgaagatactttatagaatacttagaggatagagtggttagtattttttattttttccttatagcctaggtcctacagttaggtagctaactctacccctaattctattatagatctaggttaaatataacttctactctgtatcctattctagaaatactatataaattatcgactatctaaggggaaagtataagtaaatccctactgagatccgtataatctttattaaagaaatgaagaaaggtaaaatagcttaaggacctattagcttttaaggttagggcagctatagccttaggaaataaagggataacgctctagctagatagctttactagtctagctagctattcttacttatagataacccgggcttctaggaattctatttacttatagatagtacttataagctacctactcgctaagctatcggtactaaactcctcgataaacagtttattagcctttagaataaggttaatataagattaaagataatacagtacctcaatcttacctataataagtcgaccgataaaagtagataccgaatctttaatatcttattcagttctcggtcctatagtatctattactatagagtcgagattaaggatataagtataataggggaggaagttactagcctagtctttaagaaggtataggaatacctaatctaagaaggtaataggttacctaattagttctatattaactctctagctatagatatatacaaggtaatgaatgtctactaccgactactcggaatataacctaagataagttatatattttatatcctatataacttgtacagcttccagctccttctaaaggatatcctcctgagaagtgggattaaaagtacatttaagatagtatcagagattgtattattctttaactcagtacctctacaactaaatcgacttcggaaacactaggtcgaaatctactataagacgtccgcgctcctagtgtctataataatacaatagggctcgcaatttaagatactccgcttagttcttaaatgccggtaggccctcgagcgctaggcccttaatattaaaaaggacgataggggtagagggaaaaaagccttaattgcctctaccctattagaacctaccttttaggcggatctcgataagttaatccaactcctagagctaatctataaggcacagcttatatccgaaagctaggtatccgatcttataaaagtaagtctattatatacaaagtctatatataatatatacgaagtctatgtataatatatataaagtatatataaaacctttattagcctttattctaataaagataggttatttcttaatagattttaatccaggagtaccttaagacctatatattaatgtcgaaatttcgactaattatataggaatacctagaggataaaagcctaaatggatttaaacatcgatttaaccgataaattaagccaatctactggcttacattttatcttcggctatcgacagctatctaggatctatcctttcccccggtactttaagagccaataaatacacttatcttaaagtataggggagagcctactaaaaagcagttctagcaattttagaactggtaatagcgttttttccatgctgataacggtggtatctagtctaaccaggacctagaggacttctagtataaggcgaaagtattcgctccttagcttactaatcttgccttacgtatctataatactacggctaatttagttgcctcggagtgggcattttccgctataaactttgtttactcgaaggtacgcaattcgctttcacccaagaaggttgataagctagtctatctccggataaactatcgacttatgagtaaagggcctatccagcagcctgacccagaaaaggtataggattagatagaccggtttgatgaggagtagattatcagaaatcgcttcttccgggatatgacttctcttaagcctcagactgaaagccttagtctaggaaatgagctttctgactctgagtctactgatgggggtaggtgtattataatgagtgtaaagcgtccttatgacttgtgtaactaaaaatttactgccagtttttctgccttttttttctgcctatcagctagtaatacctttaaatcggttatagaaccagcctactgaggtatagttacctctacagctaggcttaagcgcgaaacgcagtcgatgctattaccttaaaatcactaggtatataatcgtattcttacctgtaagataaggagtagattattagaaatcgcttcttctaggatatgacttctcttaagccttagactgaaagccttagtctaggaaatgagctttctgactctgagtctactaataggggtaggtatattataataagtgtaaagcgtccttataacttgtgtaactaaaaatttactgctagtttttctgccttttttttctgcttatattacaaaacattaccaatatattactagcgccttagcgtgaaacaattgaaattatattttaaatttcatgaaaattaaaaatataatttcaattcaagattttgaaattcaatttaacagccctaggctgaaaggcgttaaagaccgaacagactctgacctcattggcttagcgcggaaataagtgcagatatatatatgagcttatagatagagcatatagaatatagaactttggagtataaaatacatagacatcggatattggatagagataactaacaacataccctattaggtacgcgaaaaaaaaaaagtctgtcgtcatttggctaattgcgaatttctccccaccacagcttccttttccccgtctcgacttgccgcattcgaacttccccaattccccaactcaccaattttatcctcttattccgtctacaccatgtcaaggaacatttcttacggccgcggaggcgcaggtaagtgacaccacccttcatctctcgccacacaagtccactaaccacactacgcccatgccctaggcaacataacccgggaacaaaaagcgcccgaacccaaagacttcatcacaccaacaatcaagcaagaagtctacacgacaggtcgcggcggctcgggaaacatggtacacaacgatccggagcgaccagagattgcgcgcgagagccaagacgttgagtcaccgcccctgcgcgctcagcagatcccccaccacacaggccgaggtatgttctgcagatgacagtatatggagcgaatgcatttttgcaaggtcgtgacaggtacagctccgctaacggatgtgctatttctttccataggtggcgcggcaaacgcttacatccccacccctgaagaggaagagcgcgagaagaagatccaggagcaggaggcggagcttattcgcgtgcgcacgcagtccaaggaccgtgttagggagatcggacaggagaggcaggagctgcggaaggagtcgccttcttcttaggttggttaccgggggtggactttggttcgcggttgattcgttctcgttaagagggctcgatgaaagctgatggtattggctgcggaggagatttgcctttcttgggctgcagtgccgatctggtaagaggtgatttgtccgagcagaaacgaatcagaaccactgcgggcagtgctgcttcgatgcgagggtctgtttttttgccccatcgacctaccggttggacttatgggtctgtggtatttgcttttctttcttttcttttcttttctttgcgcggctttcccaatcggctttcccggcttcacataatagggaattgcttcatcatacctatcgtggaataccgggagaggaacggcgcttgggatacatttgggcgggttgtgttttccctctttgacatacgtttcgatgtgtattgcaacgatcctctgtgtttttcggaattgcttcctaaacaccgagaaatgataaactcccatgacaagcgatccttgcctcaattgaagaaactatgctatgtacaccaaatgtttatgctaattatacgcttcgtgtctcattagatgcatcgctcagcccaaccaagcctttgaaagagggcaccaaagaataaaattgcagactcgccatcaacagctaagcgagcactcgcgcgtcaatcctcggaaggaaacaccccgtcgcatcaatcggccagtttataagatcttgccagttcggatcaagaatgtccccaatctcctgcagaatcctatttccccaatcgcccatccaccatgaactcctaagattatgcagaataaccacataatgcgccagaacaacaagcgcaaacggccggcgcaactcgagtagctccagaaactccgcagggatacggaaactccaccaaaacgcaaagaccttgggctcgccgcccttcatcagcagcccgagcgcgtggctgagatgttcaatggccgagtcatacagatccgtctcgtgcgtcacatcccgcatagcctccaagttattctgtcgctgtagcgagaggatcactagccgcgacatgtccggcattgttgggagcgggtcttcggggtggaagagcgggtccagctcgctcgccgtgatgcgttccatcgaggccactaggatgctgactagccaccgggtcagctggaatacctcgaagaactcatccagcacgtcgggctggtcttcgtccgagtcggtttcgctgtcgatctggcagaagccgaaggtgaatacaatcattatgcaacacagtgcgaaggtcgcttggatttcttcttccggggcgtcttcggcactctcgatgccgaggcctgctagcgcctgcgcttggtacgagcgtgctgtttcaagatatcgccagcgccgggaagatgtactggttgaggcgaggtgcagtgccgagagggctaggataccttggcgaaggcctgtgtagcggagagaaagctgggggatagttgtttgccatattcgttcggaggtggggttcccagccatggatttgtaggttgttgtgcaccagtgcatcatcaattcgaggtctttcaggtgaagggtttcttcggtgtgggttgagagacatggtgggtgctcttgtggctgggaatttgactgtgaggttgaggaagtcggagatgatggcgaagtgctagttgaggggataaaagagccatgcttgttgtctagccgagtcagtcggggccgaggcggatattggctgagcatcttgcgatccaggcagtgcacacaggtcgagctctgctccttatactgtgagagttgcattagcggggaggtgcgagagataggaaacaaaggagaaactggacgctccagtctcattatcaattgaaagctctgagaaaggcccagaagccctaagcaggggtatcatactttaacgcgtcggtcactttgcatactcgtctggcgtcgcttatttgaccaggaggatttcgattcgcataattgcattgtaaaggtgccaggctcgagacctcgaatgtttattcgattcgggggttgctgtgtatttgactcataattcaacctccagggatcccccgaaggaggaggaagaaggattttctgagatcatgaaaaagtcatatcagtcataggcccaagcggtgggtgtcgatattttgatatgtccattttcagtgccaagtcggcattccaagcaccaaagaggtaaaagtggcgttgtttcctaaatcggtaaatgcaggatggctcgtgcttcaaatgacataatcatacccggcgggggccgtacttcgtcactccgatggatttggtatgtttaggagtacggactactacagagtacatattgcttaataaataattgagcacatagttagttagcaactaactacctaagtaatcagctcttgtatccaacattggaacctaggtccgatccctattgccaactcaaaactaacttccgatcttctcgtattccatattccaaaccgggtgtgaaaattactaatgcgcgatatacccgagactctatcctagaagagcatacgcaagctagatcccgctagatgcactactagcagcattttaatatggaaaaataaacgaaagacctcggacaaaccccactaagccccaccagcccctagaaagagtccacactagaccctcttcgggactagccctatggggccggccaagtctatccgaaataagtttcagttgacaagcgatgcttttccccgatcggggaaagcgcatgcgcttgaacccctgtcccatgcactttatgcatggacacaatctcgggtacgtatctttctagctcgtgatctctccatgccctaagctcctttccgattagcaccgtttcgccgtggctccttggacggctggtttcttctttgggaacgggaacgttgtccagggttggttgtcgcaagtcatttccatagtcggacaattcctgaatggaagcattgcaagggttagattgtattcgtcgatcggatttgctttgcttttactgattacagtcaatggagccctttaaggtgattactgcgccacttcctaggccccgagatgctagctcgcacgcaatctggccctgtcgggctgatttgcgatccgcttagccgcgaagcattttctttgtttgggcttggggaccctgccgactggggttgctttagcgttgttgagtaaatggcgtgatgatcatgattcttgctgttgactgaactcggagacgcgcatggctagcgtagaccgacttttgggatttgacttcggcgtcccgactcgggtttaatgattacgaaattccccggattcacgctagtcgttgtggatctcctcgggtttatcaagcgagcagttgttgtgtccgaacactaatagattgggcatttgacaagtgactcctaatgtagtagcccgcatttcgcgctgataactacagtccgccaataagcgcattctgctgtccgggtggcgtcgatcttagggtgctgagtgccagttcatcggtattctagatctgaccgaggacacgatgtgatgccacgtcgaatgtcatctggcactgaccctttttggtaactgcgcgaggtccgcacgggtagaagcaatagtagctgcattagaacaagggtccagttagctagccggatagccggtgactccgacggacgattcgatatctccgtttcagaaatcgattatctgatcgcttaggcttactgcaatgtgcgaaacagaagcggaactccgcggagtgatgtgatcgccaaatcctgcacataatccccatccctggtgataacacttttagggaaattcccggcgattaccacttggttgcctgccaaggtgaggggggtgatccctgcttccttgtttttgcgttgatatcgaaccccaggcctcactttccgacctgagacttgagagatactggtcctgatgataccagcagtgccacttgatgtgtttggcatgctgcaggacaaaaggcgtaattcatagggttcgtgcatccttccgctcaaatttgtatcaagtgtcattggtctgcacaccgatgttgggctggatactgcgagattgaagtacggtggcggtctggccagcagacacattttcatatccttgggttcttcgcagtggcttttcgacggggcgtatatgtgtatcatttttaggtgtatacgtgccaggtctctaccactgagaatggtaattcggagggcatatttctgatacactgcacaccatcatgactgagattgctgttggtaccacctgaaaccctgagtcgaaaaagtgcaaaatcatctgggggcagacaggtgtaatagtatcgtaagcggaaacaaactaacaggttagcagcatttctcaaatcatccgaagggtaggtacagtatgaaatttggatttgtggctgatgtcttgctatagatcgcaacgtcggggcgaccaatatagaccagccgatcgtcgaggccgtagctccaggctgtttgttagaggaatcagaggaaagataaagggtagtgttggccagttcgtgccgtaatagttgccatacggttggccgtgtaacacaacttggctgacgcctcccgcgatggcacgatcgactgacaaagatgcctcgggggaaagtcgtgtgacttcactccaatatcacgacgtctattttaggaaataacccaccttcatgcgagattttggcccggggaattggcgatggtcttcagagcgcttctatcggggagcgagggcatcgacatcgacgataggatcacatataagactaaagactgctgccaatgccaatgagaatagtaatataaaatccctactaaggccaagaactagcccggcgaaagcctaacgtgggcctactacggaaagagcacgactacaacatctgctcctatccaaagtccccatcgagcggcacgcccgcttacttgcgaacagttgaggccagccgtgcgctgtaggattatgttgccgctcttctagaggcagttctttgccgagcgaaggatgacctgtggtttgggtagcttgcgctggcctcacgcacggcgtacctcttgaagatgacgtcgctgcctgcgtactcgaggacaggtcgatgagcatttcgacatacccaggtttaaagtgtagaaaaaacgtcggattgttgtcttagatctatagctgattctcacatgacccgaccgcaatattactgcatctcctttgacagttcagaggtcatgcgtgaatccgaccactttagtcaaatacacttggcgtgcgagtcggttagatgatagactgccattagcgatgaagctttgctaataggccggtagctgtggagagtaagcccccagtcgggggtcgggtggcgcagaagaagccccacaaggattggccattggcatttgcaactgcagtatgttgtagtattgtacaatgttgtctgtgtggacatcaccttgagatggaagcctcgtacctttcgtggagtgactactgaatcggccgcttatcccagctatgatcgataccagagtagatctcaattggactcgagtacctgcagcgactgtcacggtaatgccgacgactgatacaggtagttttgggtgagatggggtgtccacgacttggctgagacggtgaagatggaatggaggtgtaggaggttggtgacggtgctgagttgggtaccactccggggaacgtgcacgccaacagattaaacgccacacgtcgacacgagcagacagaattgaatcattgcttaggattagttctgttggtcaattgattctgatctagactcaaggagatagcagaaagatcatcgaggtatagtcggagtataaaataaaaaataatctcctggcgtctatttgtagttccgagagaatatctggccactgtcgaggtcatcagagtatgtacttttctaaatatctattcgctttatactagttattccaacatttattatgttccaaggtcaaaagttccaaggtcaaatgttcaaagtcgaaaatttccgtttgcgggttatatgaagaattccgaatgcggactcaaatttcgtcccattcgtcagttgtaacccgacggtttgggtggttcctgcagacaacttgtaacctcgtcgacacctcgaggacatctcttttttgtcttctttttctcttcggtcttcgcttggaaatacttttccagtttcctatttccggtacgtgatatatgggatatgtgtgagccgtggaagcctcagcgaatctcccgcactttgacagcgtcatcgtgcggttgacccaagaaagaagtcttatagaagaagatgatgctaacatatcttctgtcaaagaacaccccaggactctaatatcgccactcccgccctcctccgagttcattctacggttcgcgaataaaactctccgactctttcgcttcgcattttctgcctgcaatcggattcttcacgctttggactgatcggcttggatcggtcttggtacaatcttggtacaaagttcattcaacagacccgctgcgttctcgcgccatttctttgttcagccccggaagtcgatgcttcaagtgtgacgtctgaacatcccgcggggtcgcatgtcgcatctccaaccccccacctctcttctcgaacaaccaggtagtgaagatctatcaaaatagacctataaccccaggaacacgtctttggtctatcaagaatcatcctcggttccttacaatccggtaccatgtacgccgtcgaggatagacatcatcccgtcccagctccgctctcaatggatcgcatctctgctccgaccgtccagtacccgtcaggatccaactcgctgcgccaatccgaccatttggcacccgtgacaaactaccaagatggtcgttcctggtcattacaagtggtgcagcagccgatccgggctcgcatgtgtggatttggcgacaaggtgggtgatttttccgacataattattttaccacctcttaacacacttccaggaccggagacccatcactccaccgccgtgcattcggctcattgtgcgcgatgcgcaaaccgacaaggaaatcgatatcaagtatgtcgaaccagcaactctgcacccctcggctttctaaccatctcctctagtgagatcgatacctcattctacgtgctcaccgtcgacctgtggaatgccgacggtaccaacgaagtaaacctcgtcaagcattccgccacctccccctccatctctaccgccatgtcctcctcataccctcccccgcctcagagtgtctctccgacctacccgggctacaaccagaaccagtaccctgtgggataccccccgcagatgaacaactactacggtggtcagcaggtggcctaccaaaatcaatacggccagccagtaacgtacccccaatactactccggtggtcaaatgccaccgtccatgtcgcccgctgcgcagccggtctctggtggaggtggaccgggtggcatgttcactcgcaatctgatcggaagcctcagcgccagtgctttccggttgacagacccagacaacaaaatcggtgtgtggtttatcttgcaggatttgagtgtgcggacagaaggcactttccggtaagtctggaataacgggggtcacacgacctaatcgctaatcaaaatccagtctgaaaatgagcttcgttgacgtgggtacctcgtctgccgaaactaccaacggtcccccggtcatcaatcacggaaccgcacccgttctagcctcggtgttctccgaacccttccaggtcttctccgccaagaagttccccggtgttattgagagcacccagctcagcaagtgctttgcgctacagggtatcaagatccccattcgcaaggatggagtaaagggcccccgccgaggtggagatggagacgacgatgatgaaggcgactattaaaagagcgatatttgatccatagtacttggctcaacgtattgtctcacctttccttacctttactttttccccgccttgctatgaatacgacatgggggatggtggcgcgtggcttacggtgttctgggcaagactcgggcttgcaggtttctatattgctacacggactggtgctggggggttttctgtttggttttgtttcttccgagtattattcttccccttattcttttgttggcctctggctgtgtctattcatatccttcgcggccgattgcccgcacgtacatacactttttcttttcggtgaatcgaggtccggttgaattgctgaatgccgagactgtctgcccatagaaaaaaaagtcgtttgatatccaatacactgaggttgtttagttatttgtccgggtattgctctaatactcgcctttggtatcaacaggtgtaggtggtttctgtggatcgtagccttgtctcacatggcgttgtataagagtatagtatacatccaatagttgtgggtcaaaatactatatccattcaacatatctcaggtttcagtctcagtctcatgatgctctacagtctaaaatgtctatttccactcaatacttgaatatcaataatatccactacccagtataacctaccatatctcacatgtcttacatgtcatcaaaacagcatgcaatcatcaagaatcatcagcttacccacccatcttccatcaaattctagaagacaaccagcacatcttacacagcacatgatccacaaaggacagcgtagtacaacaaacccatatccgacaacaatctcgacaattcccgcccaccatcggcttacagaatacgtcacaccgtccctgaaagccgaaatacaccggacctgacagaaacccgacaacaccggattgtccaacccgagtctcccaagccatacaccaacctcaacctcaacgaactccctacgtcggacagtgtacaacgcccgtgaaacggaccgacctaagccctctcctgacagattctaatcacccacagccaggaaatcctgacagccctctgcactgcatggtatctgcaaggtaccacactaacacacgaggtctcgggtatgcgcgctgcagcatcgttagatattcttattagatcgcagctggcaggcacaagaccggatttgcatcagggtcttcgatattgccagattagccgcagcaccggcttagtgggctgcagggtccggtgagacattgcatattgctgcaggttcgccggtttaggttgggcgtcggtggcgttggacggtgtgtggttatcctctcggaaacgaggttcctagaattttcttgggaatttgtggatgcgctgatgtatcgggccgttggtgggtcgagggttgtttttctggggaaagtaagaggcgaggtatccatgacgatgaatgagatattagaggggtttgaagaacgaataacgtatgatgtagaggtccttcgtataatatttgcgggttaagccgaccgttgatacctcattggcatggtgatgtggtgattccaattataaactgagacaaaagaagagatcttcacccgaactccccgattcctccaaggttggaatgcagcagataagtatagagtacctgatgtctcagactccatgagaccccgccacctctcggccaaacccgacagtcaatgacggagaagtcccttgatctatgggtttccctggttcggtttctcggatgtgctgctatttatattgccctcccctcgtctatataaagaaaggtacaccctcccttgattgtgactattcaaatcaaaacaaaacatctgttcagctatacaaaacaacctccaaccctccaaccctcaacatccaatccacaatgaagttcacactcacttccctggcactccctctgctggccgccgcggcaccagttacccagtcaactgccaacccacccttcagcgtgatgtccatccgctccggctcgcccatccactacctacagctgaacgccgccggtcagaagttctacctcggcggaagcacggccacctactgcccaacccaggtcacagactgcccaccgggaaaccaaaccgtcctcgctcctggcggcaccgctctggtaagtcacgagttacactatctcatgccaacaaacgtacaaaggaaaaccccctctaacaatgaacaggacaccatggtccccggcggccagcaggtctacatcgatcccaatggcgccctgagcttcacccaggctcactcagccaacatcccgcagggatccttgctcggtccattccactactctgccgatgaaccctgggctcattactccttcggctctactggtttcatggcttgtccagcggaagataaccgctggcaggtgtttgccgccattcaaaatgcgactgtgcccaatggtaatgttgacgagtgtcttgggttctcggctgtcgctctggattacactggggacgtgcctgcttggcagtatatctagattaatgatgtggtggatgcttaatgctctctctaccttgttttgatttcttgcatgtaccattattgactccttctttatcatggtccaggttggatttaataatctaataatctatctcatgcctttcgagttcagaggttgaatggtaaacatttgcatgaagctgtacttcgacacccgccgtaacgggccgaatcgcttcaggaacacccgtacacaaaatctatagtcagactcgaaagtaagttcaagttgatgggattgtgaaagaagtgtaacacttgtctcactttatcttaagctactaggatagaacaaagaatatatcacaagagaagggattgttacaggacccactacaggatacctacaatttgtatataaaccgctaacaaagttaagtcacttttatcacatcaactatttcaacaactatttcaaaaactactccatcatcatcgagagatctttgtttgctagatagctaagcgcgaaggttcgaggtttggaacgtttgcaaagggccagctatataaacaggctgcttcccactttgcaacttccttcttcttcctttcttcatctccattatctcgttagcggcgactttctgctcgccgtgaggcgccatatcgatcaacaagaaagagtaccttcaactaaggcggcttcgctattcttgaggaactgcgcaaaatggatgaatgctgcgatgacagataagatagagaactcaaattaaacaaccaaaaaatcgaagccttccgacagggccatctggatctccgtcaaagggccatctcaacatgggcacgggatgcattgcagaagaataccgaacgactgaaggaagagattcgcagactcaataaggatatcgtccacggtagcgatatacggtctgatgctatggttatcactgaacggtacaaaaaacaagtaccgcgtgaaaatatttccctactctgtacggctttactccagataacgtgaacaacctcggtattatctacaaactcccttggcactctttttattgctaatatgttctagaccaattggaatgtcacgcatccctacgggcctttggatcgagaagcttctatcctacttaaggacgcccgtgtaaggctccccgacgaggggatggagaacaaacgcgtgcagcttgttggcctactgctaaaggagaagtatgagaaggccgaggagatgagcagtactctgtgtgggaacgattgatttattgccaaagagtagtctgagaactaactttcttaagaaacctttctgatcatagttactacacaagaagtattacttaagaagtaaaaggctagtcactcctaggaagggtaataatctcaaataagaattatttgattcaagggggcagccagtgtaacacttgtctcactttatcacattaagctactagaccctccccgcctacgctgtctcatggggtcgagagggatgagaaaaagaagcgcttttatattgtcacctcctacgtgccttcccctacgaagtgactgttagggtacaataatctagatgttgtctacagtagagctctatagtgaacaaagccgtcaatacgcaacaattatattcatgaaaatgcaactaagtaacataaagggcgtctgcttgtggcctatgccccaggcaataggcagaacagggttcatcaatcaatccacacacttaaaaccaccatctaactatatttgcaagatctagtccgagcgggaacacctctcggagttcctatgactcccttttttatccaggccattgaccacggtatgcagtagcagccttgggatctccactgagtagataagcctatacacttatgatgtgaatcgaacccacggagggttgacttgggggttgaggcacccatgactccctcaactcgagggtacccacgaggtgctattgctaacatccgcatgtgggacattgtgctcgtcttggatgcatatcagacggcaaagacctgtaccagactagctgtctgttaagagcatgttttgggcttggggttttggactagatctagttccgccagatcttaatcgccttgtctttacctccactggcgatcttttgtccatcaggactccagtcgacagcaaacacctcatccttgtgtcctggaaggtccatcttgagcttgccggtgcgcaggtcccagatcttgagagtggtatccttagatgaggacactagcatccgcgaatctgccgagaaacagcactggtagactgcgcctacatggccgcggaaggtggtgatgaatctagggcgatgttagctataaatcattatactcaaaggactgaaacactcactttccatcacggccgttccacagcttgacgtggttgtcaaatccggctgaggcgatataagccatgtccggcgagaacgtgacatggtttacctccttttggtggcccagcatccgcgcgacaggcttgctcgaagtggacggctcccacagatacattgtgaaatcgtcactggccgataccaatcgctcgacaatagtgttgttcaccgtcgccgcctcctcgaacttcttgcgcgcagcagccaccttctcagcctcggtcacagggaccttgccagtgtggtcgtggtaggcggtgcgaagagcaaagtccgtcgatagcgcgaggtgattgacgcggtgggcatgcgccgccagagtctggagcagagtgccgtctttcgggttccagatcttaatggtcttgtcgtgggacgcagtgtagatcttgccagtaccaccccatcgcacacaagtaacagacgacttgtggccggtgagcacatgatcagttactctcgagacaacatcccacacgcgcaccgtcgagtccttggaggcggatgccaggcgcggccgccctgactcctgcacgtggtatggctcccaggccaaattcgtgatccactttgcgtggcccttgagccccgcacctagtgctgtcccctgctttgcatcccagaacctcacggtgttgtccatgctaccggtcgcgatcatggcaccgttcggcgagtatgcgactgccagcacccagctggtgtggcccttgagcgtatgtttcggagttccagtatcacagtcccaaacacgagcagttgagtctccactcccggagaccatggtggaggaagatactggggagaaggatgttgctagaattgcttcgccatggcctgcgatggaggccgcgcatcgtgaaacggctttcactcggaaaaccgcctgcggtgtgtagaagagcgataccgtatcttcggtggacttgatcccagtctggagtagcgagtggtaaacgtcgcggagaatgtcgatcgtttgttcctctttttcggaatggtaggcgaatcggtatggtactcgcccatcatcttcctggaaagaaatcgacgtcagtacaacatccaattgccaagaagtcacgagattcaaatcttacatttccttgtaatgtgttgaggagagtctccaggttcttcacattggcatcggcgactgggaccgagaccgcaggcccggtgggctggccggttgcttggtcgaagaattgaacgcgaacactacccagatcggacggaatactctcaatttcttgctgctcacgggccttatcagcctgaacgagcttttggcgcttgctgggaggaggatagagggttgacatggtgattgattttgaggtcgatgggggaagaagagaaatttcgacaagcaaaaatatcttgacgcttatcttatcggccctatcgatggatctactcgtacctggtacctacatacggaggacataagataactataactatatagttgactagttggttaactaagtagaggaaacaatcttaatcattataatcaaataaaacgacactggaaaccttcagatttatgtataggagggttactggtcacgaaagaagtgttggtaccctcggggccctggcttagtatcacatgagccctcaacccgtggactggaaccccggcctctaggcacaccctgccccatctatctacactctcttggccattagaattgagcttcacaatgtcggtttattcattaaattcattaaattctctggattcctttcccccatcggcctctagatgtacaagtaaacgtccgaccacaagggccagcagtgttgcacaggagatcatctgcgctgtcagtgagtcgcggggcgtctcaaccaccgttggcctcgcatttatcaaccttgcgacagctgaatctgtgatctgtcagatatgtgacagccagacttacgtcaaaacaatcatcaagataggtgtttttgaacccaacgagatcctgttcatgaacaccgccaaagagtcgaagctccgttatatcatcgaagagaatctgccagatcccatcttaaccttcctggatcgcaggtggtggtctgaaaagacaggccacgagtatgtggaacggctggcttgtctacaggaagtcgggtcactcaagctgactctgggcgggaactatttcgcagcgtgttgttttgccgcagtatgaacactattcatgctgccgaaagaacgtacttacataaaaattaggtccttaagtatgttgaagtcgaactccagcaatcctttaccacgcattctcttcggatacgcttccagccgtccgaggggtccatgttaattgatttgtcgactattgtgtccctcgaactcatccaaaacctgcaaaaggcgaagtccaaggaaagtttgtttggactactgaacgagacattgacgcctatgggggccagactactccgagctagcatcttacagccttcgacagaacgagtcaagttgacagccagatacaatgccgtggaagatctggccactaaagaggatatgtttgtgtctgtgaggcaggcgctcaaaggctttatcgatgcagataaagtattgactgcggtagagtctctgaggctagctagtattgaagactcgtgctgacggattatcaagatcatcttggttcccatcaagcggacaatctaccatgtcgaacagtcagtcaacactatcatcatgctcaagacttacgtatctgcgatcaaacacatcttccaggcgcttggagcagcagaaagcgatctactacttaccatacgcgaagtagactctacgttcgtttggtattttactcgaactaatgcattttagttgtgcgctcctgaggggcatcgttcaattgaggagctgattgacagaactctgaatgagcatgtagcctaccagtcaaagccacttgatctgagaaaccagcgcatttactgtgtcaaggtcagaactctacttctacattggatacagatcgctaacatgaattaggccggagttaacagtctccttgatgttgcgaggcaagcatataaagaagcgaatgcggacgccacagagatgattgagagattatcaggcatgtctggaattatggcatttcatggatcattctgacctatatcagagaattgcgatatggtcttagatttgaagtatgacacagcccggcaatactacatctgtattcctgctacggaactaggtccgctgccggatgtttttatcaacgtgtaccgcaagcgaaaccgcattgaatgtcagacattggatttggtcaagctcaatcaaaagatcaccgattcccacaacgaggtgatcaatatgagcgaccagacgatccaggacctgatccgagatgtgtccgccgaagtatccgggctttttcgagtcagtgaagcaattgcaatactagacatgcttggatcattcgctcagctagcaacaaaatatgagtacatcagaccagagctaaccgatactctcgccatcaaggcggcacgtcatccgatccgagaacagattcatcgcagcaagttcgtgccgaacgacgcatatgcaacaccgcaaacaagattccagatcatcacaggttgcaacatgagcggcaagtcgacctacatccgctcactagccctggtcacagtcatggcgcagataggctgcttcgtcccagctcaatacgcctctttcccaatctttcaccagcttttcgcccgcgtctccacggtagatgatctaaccgccaacgtctccaccttcgcggcagagatgcgggagatggcattcatccttcgtaacattcagccacgcagtatggtcatcatcgacgagttaggccgcggcactagcacaatcgacggcctcgccatcgctatcgcgctagcagaagcactcatctgtagtaaggccatggtctggtttgtcacgcacttccaccacctgccacagattctcgcgaagcgcagcggtgtgatcaatctccacttggcagcagacatttctcccgatgaatccaagatgaccatgcattaccgcattgcagagggtcctgttccagaacgtcgatatgggcttgtgcttgccaagctcgccgacctcccacctgccgtcatggataaagcacactccgtgtcagaggcaatggaccacctggctaatcgtaggaacagcccggggcgtgctggtgctatttccctgaagcggaagttgcttttgtctctacgtgaacaattacttctcatccgtgccggtacaaaggacggtacaatggataacaatagtcttcgggatacattgattaaactccaggatgactttgcgatgcgcatgactgccatcaacagagaaatggagttatgccccgatgatgaaaccaagacagagcctcttagtgggactacttccaacttgtcagttcatgcacctgaaacccaagcgtcgggttcaagcaagagtgacaagggaatgcgggtgtcggagcccattgtcattgaatctgagtcggattctgggcctgacgataccacggacaatgatagtgtggtgttgattgaatgttgaagttaaggaggatggtaagtgaactgacctctttattatccccattcctgtagatcatatatgtatacttttatggtgacaatctgatgatttgacggggaattgaaaaccacattattccctaatatatgatatcagacacatgaagtgacaataacatggattacctctatacaatacattgtatctgcattcgctagtaggtacaacacagaagaacaagaaatctacccctacatggtatatattttaatggcgctccccgccatgcgatagccaacccaacttaggccaaatcaaggccaaatcaacataagaaacatgaatcaatctaaaagtgacagtgtatcaaccgaagtggaacagggtttgctttcccttgttcctctttccttttttgccattacttgagtcgtcattgctgggttcggccggagaggcggttccggaactcggggctgagccccatgcgttcggggcagggccgcggttatcattccaacggacggtgccgcgagtcttgccagccatgaggacattgggcttggctgctgcggggagagcagggaaggaatcagcgccgcgagaggcgggcgccgtgggcgtgcgactagaggatggtgcggcggatgagggccggctgaccgggctaggcatcgcaggacgagagaaggatggcggcggggcggctgctgcccaaggggtggcagcggaaggtttgccacggcgagaggaggggccagctgaggcagagaggggagggaaggggttggagggggcgtttgggagagcaccgctccttcctacggcggagcgggaggatttagcagttgatgacttcaagcgcaggacgcgcttgccgctagagttgacggcgcctgttgacattccaggtaagagaccaccggctggaagggctggatagtcctcgttgatggcacgccagtcattccaggctcgcaggagatcggagcgcttagacgcgtcttcgtagatctcagcgagctccttgatgagcttgcccagctcggtgctagatgtatcgaataacgagaagaaggcatcgatgagctcggttgccgagatcgaagaagcgcggtagcttgatactctactacggaattcggcgagtttggtggcatcattgcgcaggaggttcgaagcacgttcaattacagcctcatggcgcattcggcgggtctggtcttgtgcggtagctggcgcggagtttgcagaaatattcaggccttcaaatgctgcagtaggaagaggctgagagcgcgacgtcgaggtagactgcactggggtggcagcggcggatcgctctggagcacgaacgggttggacgtcatctcgagtcagctggccgccaaagtttcgtgttgagacagactgcgaactctgtatagccatttgtcgctggtatgcaacttccgcacgagtcattggttgtgcactggagactggcagtggctcagcgttagggtcacggcctcgaccagcaccgcgccgctgacgttgctgttggtaaggagtgcgcatattatcgaattcggacaaatcaaccattctggcgtctcgccgaatgtccttagaaaggctatcgggatgtgcctcgatttggtgggccttcagatccatttgcgactcgaaaacgacaaactttttttccaagcattctttatccaggcaagcgaaatgatccttatggaagtgattttccaatgcgttgtagtcaatatagtattgttgttggcggtgggaggagcgtcggtcacagatgtggcaacgttcgtgtttatcgcggcagtgagtgtacagctcatcgtcaccatagaaccgttggcgacaaaacccgcactccggatgtcctctgaagccactctggtctatagctccaggctggtcgtcgccggacctttcgtgcttacgcaattccgccgtggtgaatagttcatgctcatgtgtaaagaccttcttgttacgagtacaaaggtcactattcggagtatacagtcagctattgattcaagaattgcgcgagcttgatatcgacataccacataactttgttgtgcttgctttttacatggcggtgcaaatctggccaccccaaacaggccacatcgcagtcttcgtccggacagttgtatcgcagcaacagcaccgtatctccgaatatctcgtcgctctcatattcgatgccaaggttgtcgtccgtccgagcaaagtccttcttgttgaaatcctcatatcgccgcactggatcatcagtgaagatcacgaagttcgattcagtctggtatacaagtcagcacatgaaatgtaactccaacgaagagcacctaagcttgttggaaaaaggttacaatatgatcataccctgcaatgagcacaagccctgttcttgtacagtgcacgcaaccgaagcgcacaaatatgacacgtcctatggttacaaggcgagaccgaggtatgttcgacggcagaagcgcaaataaagcagacttctccatcatctgcatcgtctgtagcctcttctaccggtttctttgctgctggcgtcgtggctttcgaaggctgagtatcttgattgttggttcgatcggtagtgcgagtttgtcggcctatatccccgccgctgccacgaccaccgccgcgggtgcgaggcttggggcgtttctctccatcgccggtattgtgttgcgaatctccacggccggagggagctgtccctccgcggccgcggcgacgcccaccgcgaccctggctggatgactctggtgttgaggcctggttgtcggtcattgcggaggaaggaatgtcacaatgcaagctacggcttggcgtcaatatcaggtgtgctggagctgcagaggcctggaaattgtggattgtggtgggggagaggttcggggaaaagtgagatgccgctgactgatcccgcatgccgcatttgataaggatgtgaggcctgcaaccgaccactctcttggtccttttgattacagaaaaagctcgaccgagcaattgagtgattcatggagcgttctattcaaggagtatggttttgtttccccattcccttatacaagcaccatgccagtgagtaaaagtactaggcagattcattggcttgttggcgccgacctgcttcatcaggtcaaaatatgatgagcagagagctaaataaatactgtttggtccatgtcaataggaagaccaccggctacatatgcaggccatggggttcaacaaagaaaatgagcatcagaagccacgcagagagcaaatatgatgtccaatgatataattgaccaggatcacgcatttcagtatctactgtctatatcggaaggatctccaattatgtatatcgtgtaggtagcagattccaggacctttgagactgtaaaatcactatggagggctacaccaactcccgctagagagcatgagcaaatcaaatccaaaagaaacaaaaatggcgagtgcaaattgctcggaattcacgccagcatccccatgcatcgcaaaaaataaaccaagaaagacaaaggagaatcgttaagaagcagggcttagtttggagcctgctcttccataaggatcaaagccaacctgtcactcccggactattcatcgggattgtacaaattctgattgagaattttagtcatagtgaacatgtggactcgatcttgcttgaagacagcacgcatagcattgtcgcataggatttgtcggcgatcactgggatcctgaagctcgttctcacgaatgtattgccaaacctttttgacggtttggggtcgcgaaagctgtatgatgtttagcaagcaaatcctagagagaaataatcggaagaggtgctcactgtgggctctcccagaagcgcggataggggttcggaaaggttcataggtttctgtggttgtgttagaaatggtgggaggcttgggatgatatagaaaagcatacgtggaacccagtatttcggttgacctccctctttggctcttcgccggagccaatatctgagtcgtcttctgccttgaccctcttcgaagttttggctttgctcttcttcttcacaggagctgcacgccgagtgttgcccccacgagtgggtcgcgcgcgtgaattctcttcagcttgcagcttggctgcgaatgccgcatccgcatcggtatcagtatccggcttgtgtttcttagcaggaggcgatgcgcttgcaggctcggaagtggcatcgctggaggcctggcgctttataggagatgaggagggaggcggggagggcaccgcagctgaagctgaatcaccatcgcgctgatcattgcttggggtaatttcatcaggcgacccgcccaccccgttttgttcggcgtaacgatcgaatcgttccatgatcagctgcttgagcgtagcctttgtgaatgtcagtcacagttcttcgccagtcatcctgaatatctttggggtaataatgcgccatagatcgtcgtaacttaactgaccttcatcggggtgagatcatagccgacggcatcctgaagacctttgcggattcgcttctcagagatggtagtgaggtcgcttttggccaaaataccatcaattatgtcgatatatttgtcgcgcaagtcagaggtcactattgcgcaagatcaccggtcagttaggaggctttctagagcaccggcaaattagcaccggggcaacaccgaggtagcttacacgacatattgttgctagtagatcacgtagcttggccagttatgttcagacgtatgagctggtttgggatttgcagttcgcaattgaggatatcgtggggtttgtagaggagtatggtggtcgatggagagcttggagttgtcaggtgggctatactcaagtcgcactggcgcttaagaccggcggggcattggaggcagagaaaggccaggcgaaaaaaattgcagagacaaaaggattatagataagatgctagacaaagaccaggtcaggcaaagagctccgtgcaagatatgcagtctaaaagaaatgtctatccattgatagcctctagaaacgtccataatgattgacgggcccgacctcaagctggggaaattatgactaagctgatgcagctccgtcacgtggtatcttgtgcctgaggcctaaagttaacaagtgctgactcagtgctgagtcagtccacacaaagaacccgcttggccgccgcgatttgtttctgcccgaaaatccatcagcggattgcaccgatctatctttgctccgaagcctctagacgccttcggtatacccatcatggcgcccagtttcgataccctgtccgagcaggatctccacgaggaagaggaggaggagattgatttctccggtgagtgcaagatttgtcgtggtctgtgtgcccctctctaacacattagtccacagatctcaaggagcaatatgaagtgaaagtcgaggagggactggacacatttatcgtcatcgatggcctccccgttgtacccgaagatagccgacaaaaactcgtcaagttcttattgagaaaactcaactccgttggcagcacctccgaagatgcggttttcatgcccgttaacgacaagaagatgactgaagggtgcgtattggatatctaatgagatgtggaggaatcatggacgatctctaaccttcgttcgcgcgatatagattcgcctttgtggaatatgaaaccccagaaatggcagtcgccgccgtcaagcagttgcacggcgtccctctcgataagaagcacattatggctgtcaacaagttgatggatatcgagcgttatggtcgtgaaggtcgtattgatgaagaatacaagccgcctgtcccggaaccgttcaaggagaaggagcacctgcgctcgtggatgggagatgccagcgcccgggatcaattcgccctttaccgtaacgacaaggttggcgtgttctggaacaacaagacgaacccaccggagaatgtcgtggaccgcgctcactggacacaacttttcgttcaatggtcccccaagggtacattcctcgcctccgttcacccccagggtgtccaactctggggcggcgagtccttctctaagcaaaagcagttcccccaccccttcgtgcagttgatcgagttctccccgctcgagggctacttgacaacgtggtcagcacggcccatccaggtcgaggaaggccaacccatattgacctacgaggaggacggcaagaacatcattatctgggatatcgagactggcaagcctctccgttcgtttgtgtcgcacgatttggctgcccctgcggatattgagggtagcgatgttgcgcctaagaaaaaggtgcagtggcctgccttcaagtggtcctcggacgagaagtacgttgctcgcatgctccaaggccaatctctctctatctacgaacttcccaacatgaaccttcttggtcgcacttccgtgaagattgagggtgctatggacttcgagtggtcccctgccaccgtcgcccgcgagggtatcaagcagtacgagcaattgctctgcttctggactcctgaaattggcagcaaccccgcccgtgtcggtatgatgagcgttccctccaaggaggttgtccgaacccgtaacctgttcaacgtttccgatgtcaagctgcactggcaatcacagggtgcctacgtctgcgtcaaggtcgaccgtcactctaagtctaagaagtctatggctactaacttggagatcttccgcgttcgcgagaagggtgtgcccgtcgaggttgttgacagtctcaaggataccgtgattaactttgcctgggagcccaatggatcccgattcgtcgttatcgccaacggtgaggcaccaactggtgccgccgtcctccctaagacttccgtttcattcttcgcgcctgagaagaagggctacactgccggtaacttcaagctggtgcgcaccattgagaagaagaccagcaacggcatctactggtcgcccaagggccgattcgttattgtcgccaccgttcactcccagaccagctttgacatggacttctgggatctcgacttcgagggcgagaagatcgaggctgagaaggatctcgcagccaacctccaactgatgaagactgtagagcactacggtgtcaccgatgttgactgggactccactggtcgttacgttgttagcagcgccagtgtgtggactcactcggtaagattttacctcgttctatttttgattgtgttacataatattgaccccattatagatggagaacggctggaacatgcacaccttctccggtactaccctctccgagaaccccaccgaaaagttcaagcagttcctttggcgcccacgccctgccactcttctaagcaaggaggagcagaagcaagtgcgcaagaatctccgcgagtactcaaaggagttcgacgaagaagacaagtacgctgtcgacatcgccaacaccgccgttgtcgagacccgcaagcgtgtactcagcgagtgggtcgcctggctccgtcgggagaaggagctcctggcggaagagaaggaggccttcaacctccccgaggacgcagattcacccacagccgccagcgacgcgcgcccggttgtcgaagatcagggcgactccgtggtcgaggagattgtggaggagattatcgaggagaccgaggaggtcattggctgatgaatctgtctgttctattttcgcaaataatgtgtttccttttgttcctcttttccccctatttctttgctggcgtttcgcgcttgtgcctgaacccagccttctgtccccttgtgtttcttttaggttccctgggcaagcccagtgaggatcgggacattacaaaaatcaatagatcgagcggtgcgcctcccgaccaaatgtgcaatgtggataagcatgagagatggctacgaaaccagttcctagcgaagttcaaccttgtacttcttattttaaattatttaaagtaaaccatctcaagagtaaagttctcaagtataaagcccccttcccacgcccaccgctcccaatgttaccagcatcatgcccaatgtcgagtccagcgcgaacctcatagcacctcccgtaggctgactctgacttccgatggtagtggatgtcgcagcattcggcgacggctcagtgatagacgtggaagaggactcagaagtcgtggacgaagaagacttggttgaagacgaggactccggcaagacgttctttttgaagtaggaatcatgcaagcccacaacatttccaggaggtgtatattcgcaaaccacataccagccttgagcccgcggttcgcctcgcgcgaccttcagcccttccaagccatctcctccagcttcatccacactgaaacgaggcgtcatcaccaccccttcgaacaaatcctcttcgaagacatcatcttgtacttcgacctcgacatctcttttcgcattgtcattcttcgtatacccacagttgacagcggcacacccaacctgcgtagttgacttccagaccaactgagtgaaatgccccgtcgcctcagtgaagcctgtcggcttgtcgaagttatacaattcgccttcatcaccccaggcaatgacagcagcagagacattctggtatccgtatgcgaggttctcgccgtagctgctttcctgcgaaggtaatactattagcgctattatctggtagtatggggggaattgatacataccgaatgtttccagatacaggctgatgcccactccttcgagtaatcggccaaagtgtcgttccatttcagtggtttggcatcgtgattggcgcggtaatcgttcgtgactttcagcatatcgcccttgaactcgtccagggaggtgtaggatggtgacacgggggctgtttgtgttggcgctggcacttttaccgtcgtccagacggttactacgtcggcgtttgcattgagtatttgcacggtgaggagtgtaagaatggccaaccatcgtgtagttctggtgtgagtgtttcgatccattttgaagaattcgagttattgtgagcaggtggctattgcatgatctagctctttttttttttcttatggtcttcagatcaatagatagcaccagggtccgaatccaattcaggcggcggtcctaagccgtgacgatatccccttattggaaggtggtgatgcaataatcgtgtattgtctattgtcttaggcaaccataggtatttattgtgcgtgcctgttctgttctcatagaagctccttcagataatattcttcatagagcttgagaaacgaacgtactcaacacctggagggtgaagaagattgctgggaagactgggaagaaatagagccattttgaaattctattaatgttttagactgcaaccgggcaaggcgaaagttggatcccttcttctcatctccgtttcagccgctgtggtgatgttccagcagccgccggtgttgacgtcagactcttagggctacggggttgcatcgtatcgaacgtatttgatctttgatagttgatatttcatatttcgtattgattctttgatgtctggtttatctctatttctctgtgcagctagactgtctggtttcgtctggtttcgctttgtttcgtctcgctgaaactgagaattggtgacattattatagaacttctctacttctatgtatcaaatcccgcaaatatgtaccatatccttgtacatgaatcgctctttatatactcatagcagtcgactttccctaggagaacattccgtactgacatgcatgtccgcattgtagggccctatacgccactcgctatgcaattctcgggggtatcggtatctatttacatcaaattgcaaccaaatccatacatagctcgttccacgtcccgcttgacgaggtaccagtcagcccgccgctcagcaaattcatatacctcctccacacgccaaattccatggaaccgatccgcatccgcgatgacagtcgccagttccttggcatggccaggatcgatcaagtaaatctgcacgagctcacggaatgccgtgaaatagagaagtagctcattgtttcgcaaggtttgaatatacttgaagtagtggttcatgtcgctaggaagtcaagtcagcttgctgttttgcatggctgaagatcgagatacatacctgatcaacttgagtgatccctccacactgatgcgctgtcgcttgaggtgtttacatagagcggtaaataagcggagcccaacttcttgattgaacacatctagggtgctcttgtccgtgctcccgactagcatctgcgtgtgcgatgaaaccacgtcgacgacagcgacagcgacttcgctgacgcctacatccatggtctgtcggtggggatctggggaaactccaggattgaaatcggtggctggctgtcgggttgccagaatgtagtccacctcttccatgagaacgtcgattcccttattcaggccagctgcgacacgttcatcgagcatctgttcgaactttttcttttctttattggcagggtccacaaaatcgttcctatcagtcaatctcatgccgatcaactcctgctcgtagaatacatccatcatttgcaggatcaaatcgccgacgttgaccagttctaggaaagtgaccaggggctcgaccccagattggtcacgctccccttgttcgcgaggtcggtagttggatagatgactgacagccttatcgaatccaacgataacgtgctggtatcccaatatacgtagcaatgtcacaaaaattgcctcgcattgttgctttgctgcaagtccaaattcgccgccaagccgcacaaattgagcggctctctccaagctagacttggcggaatgaactagatcaagtgcaatttcgatgctaaacagtgagcggataccctccatctttatcttcatgatggctgcttttgctgccagctctgtagttggagcttcgtcgacggccactggggcaggcgacgatattgtcgaaaatcgattggtatttttagatggttgcaacgggtttggactgcttgtttccgtgtctggtttggattcttcgtttgatttggcactagagaaacccggcaggatgtttaccggcatcatgatcactttcttgaaagaagtaaggaagtctcgtttgtcggcttggcgattgacatttgacatcaaaaaagactctgttgaggccgcttgttcggagagatgccggtcccactcactcactgtaaattcacaggccttcttgaaaaaatcaagctcttctgccaaatacagatcgaggtgtggctcgtagaccttgatcacgacattatcaagatactcatcgaatttagcatcggaccctcgtatgggaagcagagcctccgagaggttcatgcattggacaaaggtcgtcgagattgcagtgagatacgacttgatgctgacgccatgcagctcatcaaatattgccgcgaggaaaggagacaacacatcttcgccaactttcgtcataaaggttgatgtgacatccaaggccgggggaaagacgcggttcattatggatatttcgtcgttgaatgcgacactgagacgtgtgaaaaaagcctgcgtctgctccatcttaagctggccggtcgacccgtcaatgcaggaagcgacgcttcctaggtcagacttccgagtcatcaggtgattgtgatggataaagaggtccacggcagcttgcccaccgttgagtgtccatagaatgtgtgcgtatttccgcatggccccatcaatgtcgtcggtttcatacccctgacggaactccttcagcgccgcagtctcaaacatcgagactgtacgctctaaacggtcgacccgctcgtcccatccttgtgtcatgtcagatttggagaacattagcaactgtgccagtatctgcgcttgagcctggggatctttatatttcgtgaaaaccaaattttcagatgatggttcagatcgcgcgatgtcctcatagaacggtgccagtgcagcatgtatcttgccgtattcctgacgcgcctcaccccggattgaccttacctgtttcaacacggtcagggcgggttcatccatgagatcctggaatacagtgggctgtgatgccgtattgactaattcaatcttatcgaatccatcggatagtgctttcaggtcactagaagggtcatcagtggccgcaggaaccggtccaaccagctcagcctcctcttgctgctcgacgacctccatattggcgactgtcccaaacaccacttcggcatgctttctagcatctgcttcgtcccagcatccgattcgtttcaacttgtgtacccatcgagtgtcatcatacgccatctcgtgtataagcttgcaggaccgtgctgctcggatcaaatcaacagggccgacatggtcgagaatagaggatacgatctctatttttccttctgtcagcaagtgtttctttcgcctccgtatgtcttcatctcacgtacctgctggaagagcagctctggagatgtcttccattgatgccatgcgcagcgaggccagcacatctctgcgcgcctgagctgcggctgtgggccctttctttgcacctggcatattgtgttcctggactctgcatcggaagagaaggcactcgtggggatctcagaatttgaggcagcctcagactcgctccaagctgtcccgcggggttgtggggaatggttcggtctcgatatcgagcagacacggcgtcttcggggtatatttgatgtcgagttctcaagcagacatcttcacatctaaccacttatttctcaactacaaatcaggaaccacattccaatgctgcacgatcacgcacagacagggtccaacgccgccgcctcctcgggctggcaaaatgtacaccgctctctcatagagtcagctgtacggagtggacgatcgggctttctttaattggaaggaaataagacagttgaaggatatttggtttttgatgctgtagaaagctcaattgtggctgttgtgtagctatgaggaaagtgaattaagaaaattgaaagatttttaaagcaacttggtggctaaatatatacatcgggagaaggattgagatttaacatagaataatactttctgattctagttttttttgaaccattgagagccagaaaagccatttaaatcaatgatgttctccctaatatgatataagctgcaatacaagctgatatagccaaacatagctatagtaagacttacctatggagctatgtatggaggtacaggatagaacccgagatacccggtctttgaagaagatattgaatgttggggaaatatggattagtgtaacatatagatacatatgtaaatagtaagtagcaacctgatttaaaagtcttctagctatgttccaacagagcactggtgttccggtgatgcgtgtttttctcggtgaatcccgggatacgcacaaccggagaaaaaaagacgacgacacagaacaaaaagaagaacaagaagctatagaaaggatagattgggtctattctaaacaattagtagactttatatagatcaagtccattataggtcagcagaattgcgatgttccgagtgtcggttttctagcgtggccgggagccaatcagagcaagggggtaatcatcaattgtcaagtttcttcgacttcaacctcaacctccagcatctctcttctgtaccatcccccctcctctccccacccacccctctctcgctttggcgttacagcacctattcccaatcaaattcaattgcttgggttaaacatcgtcatgctgggacgttcgattctgcgcgcgtccaaccgggccttcgcccgccagtccctcgggaagtccacggtacgccctcaccccattgaccttcacggaaaaggacaattgatctcttaaaccggcattggattatccaaggactccgttgctaatatccaacagcgtgcctcttccaccgccgccggcgccgaggccgccagctcccccttctacctcacactcactgctgcgcttgcaactgccgccgccgccggttccaccgcatggtactaccacctctatggccaggaggccttcgccatgacacctgctgaggaggggtgagtgaaaatgcccaggaggatcgccgacctcatggctcattgtgcgatccatgctgagaacaatggtggaagctaacgggtgactttatctagactccacgctactaagtacccttgggtgcacgagcggttcaacaaaactttcgatcacgccgcgtgagtgctctctccttaaagccacattcgtgctctcgccagcatacattgtactgaccccgtccaagtctccgccgtggtttccaggtttaccgtgaggtttgcgcttcctgccactccctcagccgtgtcccctggcgttcaatggtcggaaccatgcacaccgtcgatgagatgaaggccttcgccgaggagcacgagtacgacaccgagcccaacaacgagggtaacatcgagaagcgccccggaaagctttccgattacattcccgctccctaccccaacgaggaggccgctcgtgccgccaacggcggtgctcttcctcccgatctcagcttgatcaccaagggccgtcacggtggttgcaactacgtcttcaacctgctcactggctaccccgacgagcctcccgctggtgctaccgtcgctgagggcatgaacttcaacccttacttccccggtaccggtacgtaacgacaagcccataccattttttttttttcctttttagtgtttctaactcggcgataggtattgctatgggccgtgtcctgtttgacggtgttgtcgagtacgaggacggtacccccgccaccacctcccagatggccaaggatgtcgtcgagttcctgaactggtccgccgagcccgagatggacgaacgcaagaagatgggtgtcaagtccgttgtcctcctgaccggtctgttcgccatctccgtctgggtcaagcgctacaagtgggcccctctcaagacccgaaagatcgtgtacagccccccgatcggcccccgccgttaaatgttgcagcaaggccttttttgagtgggaaaatgtgagaggctgaaggggccggtacgacttggggaacccataccacatccccggttttgatacaggtgcttcaaagaagcctctctgtttcatcattttctatgtgtctatctattggtcgctgtgtctgtgttttgttagaacgctccccgaacacctgtatctgtatcctagatatattctttttttcatttcctttcgaaaactgtgtgcttcgaggagtcatctgaatttaatttcctttgtgattatgacagatgaaatcgttacatataaccatgtaagtctagagttgctgtttcataggaatatgaaatggtatgttctgcgacgtggtaataagacgagtgtacagatcgttttctaattgttgtatgtatatggaagaatatatatggctataaagctcatcagaaaaggcccagaagcaacttcaggccgaggtatcatctagagtccgctcgccatccccaaagacaggagcgaagaaacgatcatagctattccacacacctgaaaacgtgatattagccacagccaccagccatggcggaatacgaccatcaggacctgcacatattctggataaaaccaaagtcacaatcaacaaaggcgcccacatggccaggaagatcaccttcccgatcttttggcgcacggttgtaatacgataagtcttgatctgcgcaagatatttttgatatgaaacaggaagatcatgttccgcagcgccagtcttgatcaacccaaggtagcgggcagagggctgagcgtagtcagaatccggccggaaatgcaagcagaccgtataccaccacgacagctttgggctgggcagcaccgtcgtatcgcctttccgggattgcgattcaaggcgcgcattctccgcagctggtgagagtagggtgcgtgccttgaaagctggtgtggtggggtagtctgggaccgggtcggatgagttgtagggttgagggaaggcatggcagttgatgacacagtcgcggtatccacgaccaccgccctctgtggcgatgatcttcgcgtagtcggccaatgtaacttcgtagacgactccgactagaggtttgtgccattgacgcttgtcgcaacccgagactgcctccacctgctgtgtccgacccatgagcgctgccttctctgacagatactcgctatccgcatctgtttcgtgatcttggagttcgacctcgtcatctgccaaaggagaaatttccctgtaatttgtgcctgcgaaacacggctctgcatacgggattcctggaagatcgaaggtgagacgaagttcgggaacgagcacacagatctgcgagagtggtttgatgccgcgcacttcacgaaaagtcttggaagctaggtttgacccgtacgcgagatagagaaccgtctcatccctggcggcggattcagatacaccaatcccgtgttcctgttgtatggatatcttctcgggaagagtcgcatcttgttcaagggaagtggcgacgcttgaggctcgacggcgttgaacattcgttctggaaatagggtcggtctcgagcttggcattcgtaggcttagaatagtcggcgaggagaaggcctcgaagccggtctagcggttgggtcgcatcgaacaggcatcgagaagctggcatctcttcgccgtcttgtgccgcttgttgtgccatcgtgtagacctataacgcaatattgggcgtatgaacatgagatctggcagcagggttaacctgcattgcttataaagcctgtcagccgcatgaattgatgcattgtcagcaaaccagatcgaatggtggcgattattaatcgtggatgggtcacggatcgcggagtttccacgggccgatcggatgaggattgaagatgcattgattccgagtggattctgaaggttagggatggtacttgagcagttgagtaggatcaggtctgaggagaatgggagagaatattatggggaagctgcttttgatagttagatgactgtgatctcaaagacgtgacaagcacgcaacttgagatataaatagaacacttggcttccccagaatctagatttatcaatctcggcatttttagatattcagtgaaagtagaacacaataatatatagaacacagctatgaatatacttccccacataattgtaagagaattaatagatattaatgaaatgagacctggctgttgattatcggatctatattcctttcatgtatatcatagtaggacaattggagtgatgttgtacaacatatagatgaggtatcatgtgatcaatatgctggaactgggcttagttcagcaccctcaccagctgcgcagctctggagaacacgctttcttttacataccatcctcatgttctgattccaaatgtatgacgatagcgaccatgaagccagttcagggctcatctgaaccaatcaatccagacaccgggagtaaggcgactgccaaagaccgagcgaccccgggatacctcaaaggctcaggtcgtcaaaagcaaaaagcccctccatcccagtcttcggagtcgaagattgtgcgactgaagttcacaaaaccaaggccacccaaacccaaaccccaagaagtggactgggatgaagatctgcgtcctacacccaatgagatagctgagaataaagggacccatggagggacctccgttgcctatacagacccgaagcgaccgaagacagttggcagaaacacaggaagcaagcgagcaatggaatcaaagccacaaacgacctcggccaaacgcaggaaatcgaacaggaagagcactactaccaaggagggcagcaacggagggccacaattgccattgataacacttactgcaagcgccttgcctcctgcagcccctctaggtaataacgggctttctgatatgggccccttggacgggcaaagcaaagattacgccacgaagctagatggccatgtgcccgaagctttgaaccaaccttcgctaccgacagatggccacaacaagcatggaaataacagcgagcgaggtgtgatcgtcgggataagaagctgcacatcggtgacaactgagtcatcctcggatttcgaagaccatggcaaagggccatcccgtacttcaaaagtcagcatcctggagcatcgggcacagtccaatagacaaacagataaaggcaaatctgtctatgtgatgcccgaggtatcctcaagttccgacatcgacctcaaaggaccgtctcgcatcactccttcaaaggtcaccatcctggagtcaagggcacttccaaaggaacgaagcagccaggccaagacggttcatgacaagagtcatcccaaaaatggtggtagagcacagagtgttggcaacaagctgatgcttgcgctccacggagcagagccttctcattacgagccagtcaatgaccgaaatgcacctctcatcatttcctccgattcagtgcaaccccaggaatctcctagaaagcagcagtctgaccaaatgccgatcgaaacagtgttggaatcctcagatattcgaagagtactggacaaagcaattcctgttgaaatacccccgaaccaaaccgagcctgagactgtcaatccagcattgattaccaaaacacttccgcctaaggaagagaagatagaacagctggatgacgcaagcttctggaagctcctgggcgatgacagaatgtccactccagcgagttcttcagaatttgaagccggcagaggcttgatgggaaacagcccttcaatccttgattaccacatggaaatggaacatatccccggatttgcaaccctgcagcccatgagatccgcaccgaccaccccttcacacgccactaacatttacgaaagccaggcagacagttcggggatatcagaggtaggaaaactcaatgatctcatagcagggattgagggacgcgagggtagccataccccggagtctcaaaagccacttctcaccaatgaatccctaatggaaccgaattatgcatctccccatcccccaaaatcagtcatgaggaccagcattgtcgacggtaacggtagtcctcgactcatgcctcagtcagccaagagcatggtttcgcctcagtttgatttggacggcgaaagtggccacgaagagacaatcattgtcactcacaccagtccaagtcaatacgatcgaagctcatgcagtatctctactgagagtaaatatgaagggctcatgtggaccaagtttcagagagacatattcctggaatatgggatccaaacggaaaaactggcgaaatctcatccatggccaccgcctaaaaagcatcgcccgtcgttctcccaggaggatactgctgatggggcccactccgagaaagcatcgacgactggaccaagttcttcccagagaacgatcgacgagagagcattaggcagcgctccaaagaatcacgagtatcttgaccaatcgtcccgaacagatatatcagggtcaacacagtcagctgataaatcgaatcaatcctctgcaaggggtgatcatgatgatatggaatggatatcaactttgcaagtggcgcagaaagacgcgcaccacctgcttcaacaaaccaatttggttagtcgatactgtttatgtgagtgggaccgtgctaactggcgtttagaatttgtccactcagctggcggcagaaaaggccactatcagtcgagtcctggagatctaccgagagggatgtagtcggatccttgacgacctgttccaggcgcaagaagcacgaatgcagctataccgacagcagatgcaatatgttaaggaacagcatgcagatatatgtcaagacctggttcgtggactgcaggagctcgaccgtcgggtgcaacaagggccaatctgaagactgaagacacggggcttaggaaatcacctacatgtattatttcggaggatgacacaaggatgagcagtattgcatgcaagtggcctgattcttataccgaaatatcaatatgatatgttttagtccacattttcccacatttctttttataaatgggatcgccgtgattggaactccagcgccggcccaagttcaccgaggatcacgtggaacttcttatactctgagcttttgactcattcgcgagcggctccaaggtttctctctatttttatattttggtattcttctgttcactgcaattacttccgtttccctcaattgcccttgaaaaactgccctcttcacctcccctctgcctccgatgtcggtgagtcaagcccctcattgatttttaattttacacctctgacgtcgccaattccacagttcttcattgataaccctaatgtgggcaaccacagtcatttggaagactctcgcagtaagtccgacagtttcattttacgcgtaattggtctctaacaagctctagttctcggctacaaccctctcaccccacccaatctccttcagcatgagatcgcattgaccgagaagtcacgacagaccgtactcgagggacgaaatgaagccgtcgagattgtccatggcacagataccaagctccagcgtctgatggtggtcatcggaccatgctccatccacgacccggaaatggccctggaatactgcgatcgcctaatgaagatgaaggagaagtacgccgatgagctgctgatcgtgatgcgctcgtacctcgagaagccccgcacaaccgtcggttggaaaggcctgatcaacgacccggatatcgacaacagtttcaagatcaacaagggtctccgcgtatcgcgccagttgttcgtcgacctgaccaacaagggcatgcccatcgccagcgagatgctcgacacaatctccccccagttcttggccgattgtctgtcggtcggtgccgtcggtgcgcgcaccaccgagtctcaggtccaccgcgagctgtcctccggtctgtccttccccgtcggattcaagaacggtaccgacggctcgctcgatgtcgcagttgatgccattggctccgttaagcacccccaccacttcctgtccgtcacaaagcccggtgttgtcgctatcgtgggaaccgtcggtaaccccgattgcttcgttatccttcgcggaggcaagaagggcaccaactacgatgctgccagcatcgcggatgccaaggctaagcttattgccaagggcatgcgtcctcgtcttatgattgactgcagccacggtaactccgagaagaaccacaagaaccaacccaaggtcgctgctgtggttgctgagcagcttgctgccggtgaggatgctattatgggtgttatgattgagagtaacatcaacgagggtgagtttttcgaacgtttttactatctgtcgaaagctgtttatactgacctgcgctaggcaaccagaaggtctccgcggagggcaaggccggtctcaaatacggtgtcagtatcacagatgcctgcatcaactgggaggacaccgagtcagtactggcgactttggctcaaggtgttcgcgctcgtcgggaaaaatcggaaacgaaataagctgtgttaagatattcaggttcatttacgacggggcatttcttaagcgtgtcacagtggataaaaagttcaatgattttacttctttcgggtttgaagctcaacacgttccaccctagggcaattttgctacgactttcttttttttagcagtagcgaagatcccacttagggcagcggcatttatagtggagataccgggccgatcggtctacggctacctcgaagccgacttggtatgccgccaagatattaagacccgtttaaatgctattgacttccgggacatctgaaggaattgtcaacggaaatggagaaacaccaaggcaagtacagaaaaggtttttagaagaacacactcgccgattggcggcgcagaaaggcgcctgcggaaggggtcgaggaagagcagttcggtagataggatcgtgtttagtgcaataggctaaaagcctaggtgtgcgttctcatcattgtatgcattaaatccgaaagtaaccctggcccctatgcccctgcgtagacttggcctaaattgcttgtaccttggctggaagttctttttttaagttggtcatattcactatggagacattgagacatttcaaaaatctgctattcatacaatgagtctacacattggccccgttcgattgggcagtaatcctcaaatgttgaggcatgcttgtggggagctcatcgaccccaacgaacggccaagggagccggtagacgacgttgtctaccaggatcacacccctcaacatgaaaccatgtgtgcagtcagaatactgagaaaatagattgtaccttttcctgcggcagaatagatgcattgcttcctgcttaaccaagtagatgtagttgctccgggaaaggaagcccacagcattgagttcattgtcaaactgaagcattccctggtaggagaaggtgttcaggtaaggatgagaaccatcctgtttgtgtctcattagtaactcaaatgccttgagtgtttgcattccgaattccgtcaggcctaaggctggccagagatcatggcttatatgaatggcttcgagagttgatggcagtacatcgcgaagttcccaggaaggggtaccacagccaatgagaaatttgagcggtagagatgccgtttttaatttgggaaacttcatcaacatgccacaaaaagccttaccagcttgattcctcacacgcagagtgaaggcttgtagacaacatgggagaagctctaagctgatagagagatgttcgatcgtttgacttgaagtttccaaggaacgaaggaggcattcgggtgctttgagaaattcggctgttgcgcggcatttgtagaccatacccacatgtaaggactccagatatggcacttgagacagcagcgaagcgatttcctcaggcaaaagagatgttttggaaataacaagactgcgcaattttgacaaattcaagggtattttcggtgtcttctcagggaggacagaaataccctccacactaaggagccatatctcgagaaccttcaaggaaggaaggtagaaccaagggatgaactgacagcttcttggcagtttgatattgtcgcgtaattcagtgggaggaaagttgcttccatagtcgaccatttccaattttgagaattgacttaacatgccaaggggtgcgtcgccgaagagagagtgatgcaacatttccccgggaaagccctcttcaagcacgaatgaaaagtctagtcgaaggctgcgaaggttgtgaagttgcaagatcagcactgtggcgtacgcgtaggcgtctccatcaaaaagccgtccgagccatctgatatcgcgatttgccgggaagttcgcgtctcgaacaagcttccgggcccaaatcaaagtgtgcctatattctagcatcatcttgttccattcggcccttccttcggggacagtgacctctgttctccgggactccacgtcccaccataccagactgacatgccagatgtaggaagccagctctggccgctcggagatagtccggaggaggagcaggattttatcaatggggggatgctgccagtcccagtgaattgaccgatacaggaaaggctcagtggaggcacgagtgtcgtgtgaaacctttgacaagttgttcgaatcttggtttggcagatactctaatatcttcagccagcagtctcgagggagactggcgaggggagttgtgcccatagttcaatagatgtcaacttactatgctcccaagatggacgctgaaaggtgagatgagagtgagtgtaagaatataagaattcctaaagcaggggaaatgagagatgaaagaagaggaagaggggagggggagggaggaaagggaagaaacgagaaagagacaaaacagacaaaataggaaaacagaggaagaccaaggcgactacaaacacgaccttcagtacctggacatccgagagtagtatattcacaaatcatattaatacaagggaatcttaaaatctataatgcaagctgcaaaagatgagcgtcgaacagatggatcctgatgtataccgtgaacgccagcagcacacggcttgacattgactccatcagccgaatagcgaccagcaccatgacgacccgcaaaccctgtcttcacctcctcaaacttgcgttttctcgaacgtatcccagttgagcaagcccgctgaacgataccaaggtcctccaattccccatcagaaccaacaccaagagaccgggtgggagcatcgccagtatcaacatccaaaaccgtagctttgccatccttcccaaaagcccaaaccctgacaccaccctcagaagactgcaaagcaagctccacagtccccttaacagacccaatctccttgccatagatcttgaacggccacatcatagcggtaggccgatatgggacagacaacaggaaatcccaatccccattctggttttgcaccagactctcgcgccgcttgcgggatcgctccgagtcaatgtaccagtcgagtgcgagatcgctggaacccatcaccccgtcgccctgacgttcacgctctttgcggatgacgttgaatacgtccaggggaatcgagtacagcacgaggcggtcgccatagactgcgacaatacggagaccccagcggaggtcggagccagcggtgaaggttgatgggactgggaggtctgttggaggcggatttgtatttgagggggatggggatgggggtggtgtcttgatttgtcggttttgagtgtttgagaaaggtggcgggacgcagacgaatgcgcgggttaggcttgttggcccgcctattggagcgtcggtgccgatacatagcaggcttgtgcgtggctcgatgaacatgatatgcaaaccgtcgttaatggggacggcacgatagtggtgacagtgtgttgcccggacgaagctgcgggatggggtgtggggaatgatgcggcggttgaaggactgaatatctgcgaggaaatggaattggttgctttttgggtcgagttttggtgatgccaaggcagatgaaggggaaggtgaaggtgaagggggacatttgcattcgtgcaagcctggtccggatagtgaagaaatgagacgtagctcgttgggtgtttccggactacttgggaggaaatgaaggatttcggagggttgggggagggtgaagtgtctgcgttgctcctggtgctttgtttcgttcaggctatgaatctcgatgccagcggcgcagccgaaagcgacgatcggccgccctggacagagagcaactgtccggggtgggttgtcgactgtgcagatgttgtagaagaagtggcgggatgaggtggccattttgctgttgaaatgagatcctttggtagtcgagtctttggcccaagccatatccaagttgcagatcatgccaacacgactgcagagcaatgcagcgatggtgaattgtggcttactggtgtcgatgacggccgacagaatctcgaacggacacgagatgcgtgagactagcgctatgccatggctgaagggtgcagatgctggcctagaccgttgacccgaaagataataaatatagatcgtgtagcctgtcgttacaagcaggtagttgctgcaactgctaatgctgaaagttgacccggatcgtttgccttcggtctgcaaaaccggctgaagtcgagtgcgggatgttcttcttgcagaatccgacagattcgaaaagtctaccacagcggtagtcaaaaaccccggcttctcggcattcaattttcgccccgaaaggagacattctgtcgcaaagcggcggctcattctccagacctcgctttcatctaaccgagagacgcgtggcgtttgacagtcttgcagccatgcatcccaccaccctgctcttttcaacatgttctcaagtagcttgtggtttaggctaattcgcatccactgtgagcatgtccgccgggcgttgtcgaagtcccgcggtgtcagcatggagaaaatctccagtaggatctctgccggtgcaatatttgcagcgggacgagatgagctgctcgttgaattgcgttttgagagatattgaccctgtgccatgtattttgtcacagacttattcaaaattgggggtattggcctcgttgagtttcgttttgtgtgcgtggtagaggcattcttggacatcagacgggtatagtcttgaccggaagaccgcagcgcaggcatgttgatataaccttccagcaaaggaagtgatccactattcattggatctcaatccctttgttcgatccagaacatttcttgcaaatcagatgttgggattggatgtgaagtgaatttgacggcaattaattgattggcgtgccttcagttgaaaatacaccaaatagcacgacccaagaccgtaatttagtgacgcaaagacccagggaaaagatctttcactcaaccgggtctatacagcactaaacgtccaccggatgaatcgcctagaacaccagtaagcccaccgatctgcaatctctcaaacccgaactgccagcaattttaattcaagaagggtgtccacttacttttattaaagtatatacacagctcgtgacactaaggtttgaatgaagtacgtgccaagtgcaaggttgtattggcctcacgtctgaaagcgggtgcgacgggaatttgatacgacaaaatgagacccgggagactcgagggcgaggcaagggctgacttgtttaattaaatactgcacctcatcatttccagaggcaataagctaagtttgccatctagttaaaatgaattacaatcttacgagtctgacgtcgacactcacaaaatagagtgagtcttagatgtacctcgcggaaatccgacaaaaagtggagcacgtcaagcgacatgtaagaaacgaatatgcctatttaggtaggtgattaatactagtacatcatgcagtcatgtagtagatgcagtaaatgcagctactgtcattccatgctggaatggacgttggaggcaacgggagtttagggtttggtgatccataggcctaaccatcaagctcaacttacgcatcgagattttattcgacttcccatggttcaattcaatcaaccgtagcagccatagagccgtgttgcagtctaagaagatgccctgttccaaaggaagtgcccactatcaatctgcaacactgacattccagatctcggggagagaatcgaggaatgcgccccggatgcagcgcatggcttggcactgtcgaacctcactgcttacatgcagatgtctctaatcgtgtgatgatggtcataacaagaagataatactaacagccttgaacaactagtatttagttcagcatatcccacattcctgaacgcccaaggatggtttgttttgtctctgttcttttcttactgtttcatctcctcaccgcaagagagacaaattgtgccatcccccactgctcaggaatgtgcctcgaccatgtggaccccagggattccagaagacggcgattctgtggatgttcgaagtatgcctgggatgtgggttagatcgaaccggtttgcgaagccaataatctccagatgcaaataatggctattggacggtatattgttttcatatcgatgtttacaaattcacaattggggtgtggcccctagcagaataatgtctcaggttgtctcattgaggccaatccttgagacgcacctttcctgcaccttttatcttgacaactgtaccaagctatatacatccaaatacttctacattcgctagagaaaaaatataagggtttggctttctcatccctttcttcgggacctattgactttgtgctcagacacttccacgtttttcgcggacttattttggaactgaggaatgcgagaaaaaaagtaaacctaagcgagcctgatgtctttgccgaggaatccgagatacagacgtacttcggttggagcctgccttggacgtccgaaaggcagccggtcacgcctgaggggtaattagaaagcgacgaaatccacggaccagtatcgtacagacagatttgcgctttgagaaggagaaggccagaaatagcattgacgcaagataattatggtatcgtatacaccgagtaaatgtatctacagctccgttcccataccgctctcaatcatgttccctctcggtgcgccgggtgctccaaatgcgattagtcttagggactcggttgattcttacagatgatagcgattgcgcctcactagcgacctagatataagcccagaagtaaaaggacttgtcaagtccaatgaattctagacgacttctctttccagacacaataagccaattctatgccggctctatattcgtgtttgacataaacattgaaccacataaacgaggggactggaaaactaaataacaaactcaatcactgcgcgggaggggaataacgagggacaggcccacaacaggaaaacaatcatttcatacaaggatatcataaccatgaaaatacatcagaacaagatcgtgaaatgcgaacaaggtatcaagatcgtaaaacatgacgggtcaaagacacatgcagaaatggaatggagtatactgacaaacggcacaaggggtagatcaggcgaacctacacaaccagcgagatcaaacgctctgtgtcggatggacgtccagcgcggacgcgccgtttccgttgcctcgagcggggttgggaccagggagccaggcagcatccaacgggataatcaagctcgggttgacgtacttcctcagccgcaaatcgaggtcatgtccgccaatgcgtatcggaaagctatcgcgatctaggcctgatggcggtgagaaggtcgatgaaggcgagggggagatgtcgccaccacccggctggtcccgattgatactcttgagggcaatgaacttcatcaggggctcgtatgtacgcccaaaccagtatgaaaaccaaacggtgaagcctagaagtggcaccaggagtagcgaccgcgtgatagctcggcgcagagccagaacaccaatcatggccagctgatgaaccaacagccccacaaacacgcgattgcaaatcatcggccacgcgcggccagtggaatgttgctggtgatccatggcatatagcagttggtatttgtagataaatttgccgactgtgaagtagatcagcccgaataggcagatcagccacgagctcgggaacacactgtaaaccacacagatgactaatatcaagatggtttgcgggatggagaaaccgtagctgaacttgggaggagttgacagctccgcatattcccgtggcgtgcgtgctgataggaattggaaggggtagagtgcgacacttccgaattcgaggagtcggaaggggaaaaggcccaatccctgcagaatcaacaggttgatgtagaatggagccaggccttcgagggaattggccaatgcgagggcaattgttgtagaatctttaaatgcatcccgaagactttcccagaacccatagaagccactcgctgttccaaacacagtgaacagaaggaacaaattgaagaacgagaagaagaaattcttggagatcacggagagctgaacatccccacgtgacaccattccttggttgttcgagagccctgcaaagataattagcgatttgaactacagaacgggtatgttcaaagacttacactcatagagataaggcacagctactgtcaacagcgagaatgcgagggtaggcaatccggtctgaaccaacgacttgacgatcggatgttcctggaggaattctgccagccgagggacaatcgtctcaagtgtcttcagctccagcaatgaggcaataggaaccaagagcacagaccaaaacacggtgaggaatccaatgaccatggtgatggaccatgactgaaccattcgtcgagtacgcgacaagtaagtgtttttccaaataacatctgccggcgccggtgcaagtcgagcgaacatctgcattgggtgtggatcaaggatcgcttgaacaagcatttgagacgcggcgattgactccatcgtgacgaaagcaatctcggtagtaggatattctttctctcgggcgtttttgatatgttcatcaatcttccgtagcttctcctcatagtaatcgattgcatcgatcatccggaaacgaagcttcaatggaccataccagatacgagtcttgggtctttcattcgaatactccgagacatgctcgttctcgtgtccggacaggagtccggaccgttcatcgtctgcatcacggggttgttgctccgtcagcggcaatgtatttccatcgttctttggtcgcttgtatcccatatgttttgtccatgctctctcaagttcacgaatgactttcattctctcgtcgatcaattcgtccagctcccgccactttcggcacaccgtgatactctccactttgccgactcgcaggccttccacgaattctttgatcttatcttcggttcccaagtcattcgggattccggacagacgaatggtgcgatcagtggtgcttgtctgattcccgagataggattgccgagtgcgaataattacttttgtctcgtcaagaagcatgtagatggccaagccactgaagacatatgcgaacagtacgtatatccaaagatatccagggtctgtaactggcttttctttttcgattccaccaagtgaactcatggtatcattgccggggacgttatcccagccaggaactccatattggccggtgtatttgtagtgcatagggaggatgatggcaacagcgaagataaagacagccagaagaaatcggatcgcaaacttgaagaaagacatgaactgcccaaagactcaagtcagcaagtgtccatgcattgtctggagaagccatagcattcgaacataccacatatgcatctaggcccgcagactgcagcacctcctcttctgtaatccgatgaagaacgggaatccaaccaaaaagggtatctggaagctcaggtaactgcgaagcagcatttctttgtcgtcgtcgggcagcatacaactcggtccattttggtcgcaaaatctataagcaaggcagtcagcgattgacgacacctcacagtaacagagatacttacacagaacgtcaaaaaggcgatgagaccaagcgcagagctaattacaaactgcgtgtatagatcgcgctgttctttcacagggtcgttgggacgccatggccttttgcttccgtcatcaggcttgtcggcaagcaatgtcaacgcagcgcaggctgctgatgccgtaagagacatgaatatgttttataagggatctccgcacttcgggtttccgtgatggcttcgacgagcgagtgctgtcggagctaatggttcgtcaagggcatgcgggcccactgaaatgactgacgtcagggggatgagatggtcaaatgttggagacgattcgatttctgttgttgccgcgattgtcgagtccttcgatttgggtttcaaagggagattgtgaataaatggggagtctccccctttgttttttgctgttcatcaaaccttaaccttcaatgacggcttccggagccggctgcataactatggatgagtcatcatttatacgcacccctgggcataatccggggattgcatgatcataccaacgccagatatctacattgactcaggtttgaagtgcgctctatagatgatctattttgtgtcacagcctgacgtggtgcaaccatgaatccagtcaaaagctgggaaaatctttcatgcatgatatctaattatgcgatatgttcaggggaatatccaatcgtttatctaaaagccccaatccaaatttaggaatgcatcgatgcgtcatagtaaaggtcaagcagacatccggcggaccaggactgggtgggtgactgtgtttttcgttagtatcctgtacaaatgagaaatttatcgaaacgaaagtaacttaccgaatcattacaatactccccagtcttgttcgtcaattctgttagccctttccaaggactctcttgcaatgccttcttgcagccatagagtcgtcgggtgacctgctggaagcattcagtccgttctccgggcgtctttcggcgcaggagatcgaaatgcaataaagcacggaggaagtaaccgcgttgccagacccactctggaccctgatggtaattgcgacccttggcagtcgcgaagtcactggagtcatcggagttgatgtagtatggacggtagttgagatcggagggatccagtgtcgccatacccacagggcccacgattgtggagtcggcaattgacagagcgataagagcctttgcaggcgtgaatagatcccgagcgactgacattgcgatggggaagttggagcggagctggtagtcttcgtagggcttgccagacttgtacaaatccttgtagattcctcggcggttgacgattttcgcgtccacatcgtactgactatcttcactgggatcaaggggaacatagtagcaccgctcgaagttgtccttgattttgcgcgcccattcagcaaaagtaatcttcttgccatcggagatatccacgccttcatggggatacgccttggattcatgcagacgtgccacccatgccagagcgctgtaggcgagaccggtaatctcaatagcggcaccatcgcggggcgttccagggacacctttgtttccagccttggtactttctcccatcttgtcttgccaagtaccacaattatcctgattgccaccgaaaatcagacccgtttcccagtcaaccttaacgtcgatctggaaaccttcaggcttcatctgacaatcaaggtcgggaccagcgttgtattctctgaaagaaatgccagaagcatgtctttggaaaacttcctggacgcattcgagaagagtcggagactgagagtatgcccgagaatcatcgaaggggaaccaagtgtcgtcataaggcaagaatcgtcttggaaccttctcttgcaagatatcaatgccgttgggtgccatttcagtgaagtcctggatggcttggaggaagaaccagacagagtcccgagaattgtatcgtggcaattttccgctgctcagcaaattgggaatcatgccatgcttgattacacttgcaaaagcgagaatatgctccttagcgtcatcaaagcgttgagtgcaaaggaacaagccacggatagaaatgaaaatatctcttccccagcatcttgtccagtcaactgcaaaatgaggcagtccggctgcaagactggggaccatcttggttggccacaaggatgcggatttcacatagccagtttgctgtacgctgaccatagccaattgatgaatgaattcctggccatgccgcacgttctctcccaggagatgaatacccctcttccacgcagcattgtaagcaacctgcagaacgattgcgaaataccttgggaaaaggaagttgggcaagtcgcggacagcgttgaacttctcacgaagccatgcagcaggagttttcaaggcgacacatccttccctagtagccgccctctccaggcgaccagtgatgtagtccaaagcccactgaccctctcgcaagtgatcgcagagcgggtggccaatttggttatacttgatgatatcctcaagaatactccaccaaccctgaagaccagcatagaccataggttcaagctttggaatgctgtaaataccgtcctgaccgtcgctagaatctctctcttcagcttcgcaccggtatagcacaaagttcagatcaatcaagctgagctcagagaatgcgtcgtctgcaccatcggcgaggttgttttcaaatccattggcatggtctgctccgggaatccatgtctcgaaaagagcaatagatccgggaacaagggaacccagtacggagattttgagatctttgtcatcttgctcgatcactgcaccttctatatcccgggtatggctgggaagacccttcaaatacttgtcatcgcctaggatcttcgcctttgtttcatcactggcatcaacctcaagctgccacgatccgatatgcttggcactggtacaggcaatatgagttggggcgagaatcgcaccactctcattgccagggaatgcggtatgcgcgaccaagaagataccctttctggttttagggtggactcggtgcacagtgatgtattcaccatcgtgatgaatgtgagtttcgtcgtagccttcaactcccatcatagtgtggagttcattcagaacctttttgacaccaccaatcccaccctctccagacccgacggctagagtctcggaattggaagagtgagaggtgtattgtcgagtctcatggacaagatcaatgagtttgggatacacctcatcgtagcccattacacttccagtcgcggaggcacacattgccacaagtgcagcatttggaagagtgtctcgagcatcgcgcttctgggcagggagttcattgtcatgggtacagtccatgaacaaggccggaactggacagggccgaatatgagtgatcttttcgccactcttgcgagacctagctgacgcaatagcatgactactgccggcagaaggcaaatccatctcgaagcttccgatcggctgacccccatgacgatgaacaagacgactcaactcttctgtgctccaagcctgcatggcctcccgaatcagagcattgatgcccagccgtttgacgaagacatagtcggcctcctctgagcctgtgaatagttccgcaaacacagtcaagtcaggccggaccttgcgagcttcgtccagcaaatgttctgcaaccactagcggtgtcgaatggcaattatcgattcggaaaccactgaagtacttagccatgagacgggtatactgcgacatatagtcccagaggaaaggattatcttcaggagaggatccgtatcgaagttttacacaatcaccccacacaataacttcgcggcgtaagtaggccctggaatcgggcccggcattatctttcatcgcgtcggcattccagatccaaccgttattgactaaagccagggctttagggtcgtgatttttcgtgatatcattgagaggaaggcgggtaaagtaagtctcgatcaatgggttttccttggtgacaggacccatcttgggaccatgatcctcaattctgagatacttgatacgattgaacagttggtccatgatagcatcgacgtctgcatcatactccttgtagaatggcaagttggcctcatcgagtatgtgggacagggcgtgttcaacctcagcaaggtcggtgtggcccttatcgtaatctccaaatagcacatttagagcaactgctccgaactttgggtcgacggcgcggccaaaacgtccgcgaatctgctgaacggtcggaattccaagctcgcggagaacattggcttgttgcgtgagcgaccagtgtttgaattgctgcatctcgccgctttggacaagcgcaggatcgatgtctgcattgatccattcgtctataatcttcttaacgtcattctttacgtcgagaacgtagaattcccatagacgagttccatcaatggcttccttgcgtgcagcgttcataacagtcactagatcctgctccgttttgaattctgtcggaagaccggcgtccttgaggctatcgccgaatttcaaaagcgccgtgtctagctcgagggctgactccagccatggcgcggtctccacactgtaaccagactcgggatgctcctccagccacttgctgttattagctgtgtggttccataccacatcagtcaatgtgagaaggccatagtctttctccatcttcgcaaccaatgtagcgatatcatcttctccattagggaaaaatgcgggatcgaatgttaattgatcaaaaatactatagggcgagttggacgagccacggtgcatcaggggtgtgaaatgaaccatgttgtagttccgctgaccgatcccacgaaggtgtctatcccagtctgttggatattgacccatgaactttgagattaccgagaagatagagagtgcattaagcggcaaatctttcccctgaacggtaagtttgggcgacacatcaatgtagtgaacaggtgtcttcgtcggcttcggggtagacaccttgtcgaccgagaactctggcagcggagaaaatgttgtatagaaagcaaacgcgcccgcgaatgtcacaggaatatcgatttgaatgttctcactgaagttgggctgcagtctacttttattcagcaactggcactctcaatttacacaacatataggaagaattgggatgatctacctgaactcccggaatgagtgacgttcaaagggctttccctcctcgggaatattcacccagagactgccttgtcggcaaatggagctcgttccctcgatgatgaatcgaagcacatatccggattctggcggagaggccaggtaaatgtacccaccaggcacgtctggagaaccgtcatccttcaaaggaagcaagtagacctgacgtggggaggccatcgcgacgggttgataacgattaaacccaacggattgtgagagtacaggagaatctcaaacgattcgccttactgtcactgcaatagtgaagaggatagagaatatttaaggagagaaggaaagaatttaaaagcagggaaggaaaagtcggaagacaagagaacccagcgttcccctcatatgttcctggagaaagctcagaccgcgcggggaatgacatcatgcactcattttccttggtaagctatcaacaccatctacgtcgctatgcatccacttgttttgacagtcttttaaagattcaaatcgtctagtaaataatcccgcttcagttcataaatacacgccatgaaagtctatacacgccatgtccaatgccgaatccagccgtaattataatcgtgcagaattgaatcgagcgccattatccttaccattggaattttgtgacggagaaactggggctcgggcgtgaggggggctagagagagccaaatggtttgataagtaacatgaacatagaagtagaggacattcaagggctttttaccgctcaatgtaagaaggaatctcctcgaccttcatggttccctccaaaacacctgtgcaatgttagcttggatcgagccgtcacatgtcaaaagaacagtatgaaaaaaaaaagaaaaactcacggtaaacagcagtgaacagagggaactcatcctccatgccttgtgtccgcaggaaactgttgacttctatagcagtagaagtaccttgcaacttctggccgttgagctcagtcctctcgatctcctcgataggctgattgcgctcaacgctgtacttggcacaccggaagttacgaccgctgctggcgctggtgatcaagtctgccacaccggcgctctcatcggtgaaggtgcggttgtcaatcgtggcgctaaagaatgtgtctccaaacttgaccatttccatcaagcccacgcgcatgatagccgccttggcgttatcaccccatcccatgccgacaacccagccagcggccagagcaacaatgttcttaagagctccactgatagacacacccgcgacatcgttgacaacacgcacgtggaagtaagggcggtggaagagtgttttcagcacgaggtggtccacaggagggtatgctgacggcagggcctgcaacttgacctccgagatttgacccgtggtatccttgtgctggaactccaccaagttggttgtggaggaagaaggcgaccgctcgggagtgggggcctgggagtccaagtgtggggggtcataggcgatgctggtctcggaccacttctcttgggcgacctcaccggcgatgtttgcaccagacagggcaccgcaataaatgcccaggattctgccaatggtctccgagaagaggtggatacctgtactgttgacgtccacacccttgatgcaagagatgccacgagcgtaggggagaatcttgcccttgatttgctcgcaggtcttgataataaactgatggggcaggttgaagatgagaatcgtgctgtccttcaccgcatcctctagggacggattggcgtggaggttgactggcaactggattcctgggaggtacttgacattctcatggaccttgttgatcacctcagtcaatttctgagggccggcgagtgaggcattatagttcttagacgtcttcgggacctcgacattttcctcgaatacccacatctccaccttctcctcgaagagattggggtttccggccgcgttttcggcaacgatcttagcgatggcgcagcccctgtcgaggaagcacacaattagcacaaatccacagctctttttgaagactaatctcttaccagttaccggagcccaccaccgtgatcttgtgcttgcgctgatgaggagctgtagaacccatgatgtgtgtaggagaaataattgatctgtgggaaagtggtctggagaagggtttaaaaggcaaagaagaggccggcgggggcaaacggggtggaataatgaatcgggtctggaaccgggctgaccgaggtcgaaatagggcgatagaggtgtgaggaacgcagatccgacgtaggtttagacgaatatccatacaagttatcgttgggaccccgataattccaacctgtttcgggattattgccttctgatcacaaacttctgatgtcacacgcaaagtcgacttcggagatggcaatttagcgcataactttttgttttcgcctttgacacacacatgaactaattagttgaggagagagccaaacagcgttgagttcctgggcaaaggagtggggagagtggatgcgggcggtgaacaattggagtcgacggggtttcgcttttcccgtcgcaatttcgtcttttcgttaactccccgctgtagatctcacatgtcaacatggtaagatgcactattacttatcttgttccactttcagccggttaattatcgttctatcttcacaggcccccattcgcaaatcaatgacgaaaactgcctcgggcagaggtgcgatagccaaacctagtgtctttggtgacgaatttcgcacgagcaagagggataagcgtcagatcaagcatgctgccctcgtgtctaagatcgagaaaaactctcaaaagacccccaagcgtcgacgagcatcaaaaaaactcgtcgccaacctcgaatctttggccgatgccttgcccgaagctgaagaatccaacgatgccgccagtcaagtgaatgtcatcaagcagaagaccctgagacacaagccaggcgccctgaagcgccgggaaaaaatggaaagattggagcgcgaccgtttcaacaagaacctgaccgagatgtccaacatcacatcagctccggctgccaacaatggcgaggcgagtaccgagtcgaacccgacggccagtcggtggtcggcgctccgtaacttcatctcacagacgatggaacagcagcctgtgttcaagacgaataaataagggtggctaggatgaaaataaaaagattcttggtgattgaaccacgactccggttgctgctgctggcagtgaatatctgtctcacaagtgaattctggcaatgacaatccaaggacaatgctaaaggttgagtttaggcaaataaactggagtgtacgacgctcaaccaaaacacgatcggaccacttgcttctataggatctgaacggtgaaatctacggtgccaagcaggttttgcggttcaagctcctatatccctgggggcattcaacgccttctggggccacagacgccatcaaacagccctcgatattagagaccaataatcaaatacccatgtatttatcttactaaattactgtctttccactcgcatgaatcagaatcaaatttccaatagctgaaatattgaacgctatggtttgaactaaccagcttatgttatcaagcacaattccatccatagttaccacccacaccgtttgttcaagggacgtcgtaattcgtcaccggtacaagagttatctcccaatcttaatatagtaaattatggatcagttgcccgggggttgctcttctagtaataggaccttcaagattacatgaagcacacaacatatcttaaggcttcgagcatcaaataaagcaatcgctctatcggcatactcggtacatcgttattgtctttgaatttacccgccggtccacccggcctcttcatcggcccgatgactcatcagataagatcacctgcggggaaggctaactatccggtatctaatccatcgctctccaattctcccgagatccttcctttaccttgtgactttaaggttctctacccacttcttataaaccgcctgtgatccactggcgcccagcaatgctgtggcggcacttacagcctcgcctcgcggcgaccttggctcgtcgtgacattgtccggtgtcggcttcctaaatcatacagccggtcaacacgccaactgtctagctccaacacctttcccacatcgtctcaatttaaccggtcagaatttacaacacaaccatttactgggagctacgagactggaggtcctactccggggccattaggatcaaccccggccttcggcgctccccgcatcacaccgaaagtcttaaagcaatatcttgatcaatatgtggtcggtcaggatcgcgcaaagaaagtgctcagtgtcgccgtgtataatcactaccagcgcgtgcaagagttagtgcgccgagaggaagaagcagccgaggctctcgcgaggcgtcagcggagggaagcactcgagattcatcccttagacggtatatcacctattgagttttgcgctttcgctcattttctgattgatttttcgatacagcagatgacattgcaggcgtgcgcaagactgctacaatacctcaagcccccaaatcccgcccagacacccccttggaccaagcagatttcgccgatacgtcgccgctacagcttgaaaaatccaatattttgttgcttggtccatctggtgtaggaaagacacttatggcaaagactctcgctcgggtgctttctgtgcctttcagtatctccgactgcactgtgttcacacaagccggttacatcggagaggacgccgaagtgtgtgttcaccgacttttggcagctgcggactacaacgttgagcaagcagagcgtgggattattgttcttgacgaagtggacaaaattgcagctgcaaaggtcagtcatggcaaagatgtcggtggcgaaggagtccagcaggcgcttctcaagatcattgaaggcacaaccgtgcaggtccaggccaagccagagaagaatccccgcgcaacgaatgccccgaatagctatccctccaacagtcctctggggaatgggtcatttcaacccaacaaccccaatccagccgccaagggagaagtgtacaatgtgcgcacggacaacattttgttcgtgttctctggcgcgttcgttggactgcacaaagccatcatggaccggatatctcgtggatccatagggtttggtcaaccagttcggaccacctcaaacactagtgatttccctggctcgccaaatatctctaccaaccagccacttccaatccttccgggatctgaggaagaagcactatacaagaagcacctccccttcttctcctctacatcaccagccggttctggcgccgagccaacctatttcaacgcactcgatctgttaacaccctcagacttgcaaagctacggcttcatcccagagctgatcggcagaattcccgttaccgccgctctctctgcactttctcaatccttacttatgcgcatcctaaccgaaccccgcaactcccttctagcccaatacacgaccctattctccctctcgggtatcgagctgcgcttcaccacaccggcactccacaaagtcgccggcaatgccttcacaatgggcaccggcgcacgcgcgctgcgaactgagatggagaccattctcagtgacgccatgttcgaagcgcccggctcgagtgtgaaatttgtcctcgtgaccgaggccgtggcagaccgtaaggaacagcccatctaccttgcccgtggacagggtgggcgtttccatgctttaatttccgccgaggaaagtcaatgggaagcaaagactcgcggagaaaagaaagaccaggcccaaaagagtaaaacgcaagatgatgcggatggctccaatgcgttgaactcccaggaccagaatcgagcaactggttaagtgtaaataaatggtatactttcatctcaccccccggtgactatgtatttatacatttccgggtattttttcttcgtatcccagttgcattggcggcatttagcgtgcagttcagcaaagcaatacctttggaagctccatacgttcgtacgatcggtctttcattactgatcgaacgtggatctcaattttgaatggaattactatatatgagtaaaagtctcctatgaaacttttcacaaaagtttgggttcatttcatggcttcatggctttctaggcatagtacaacaagaacaaagcaaccggggtatcataaaagattgtacaaaaagagaatatgagagcaaccatgctgtttgaagtagcctgctttgatcggaacttcacaagaatcacttgtagggagcagggtactgtttcgtgccattgccgttgctgcctgtgagggtcgattgaatagaggcattggagttgtgagatgtccaattcggggtctggggtgtgctcatggccaccggggtagttgcttggctagaaggctgcagcttgggacccgacaggtaggccatgagggtcaatgaatctattttgaaccgtttaaagaaatggccgaaaccacctcgcatgacagtcatatgaccccacttgtcccaccgtgccccagtgggagcactgagtgatgtgacagcgacgaagttgcggaagcgtggtatgttaatcaatgaccaccctgcgaagaattcgatcagatgatctgcatcgcgttcaaccttgtccttgattctgaggtcgtggtgctctgtacgactacagtattcatccagagagggtgcgataacgttgcttcttgagttgtgatgtagactggctttatcaaacaaagctgcgcgaggatccgtaacgttgttcttgatgatcaacgtgtagatgagcaacaggctacattcaggttagtaagaagcttgagctaaacaacgatagaaaggtatgacatacagtccatgatcttgcgagtgattttcgtcaccgagtctcatttcgatccattcaagtatcctagggggaaacattaacgtccaagatttccgtttgtgcttatttgcattccgaatccattgcagagtgaccgccaccccttttaggtctgtcaacacatcttcagtgagaagtatgacaccgccatacggaaagatacgtagacggtggtcactaggtgaacaataccggggatcaactaattcgagtggtctctgaatgcgaaccatccagaaattgaacgagtgggcaggaagcacagaattgagaggaggctgcaaagtatcgtatccaacgaatgattcgtgaaactgctcttgattagttgtctgacaattgtgaacgtgtaaaaatatcgatcacatactatggctacaccctgtctgctgttgtgcacaaattttgcccaatctccagggctgttgcttgtgaaaagaatcttctcatgatacttcaagtgcacctgaagaagctgcagttccttttgtatttcttcattgcctaggggaaagtgcaaatagaaaatatctgcctttgatagcttcccaccttcctcgattgtcgcaagttcttccacattgattttgtgggctttcatgaaatcttcaaccgcttgaaccgctcgagcggcttgctcatcttgtgggtgagggatagcgcacattgaattatccctgagttcacttgtgggcggaaggctttgggctggcgctggggccagcgtctcccgcgagtgcacggatccactcgttgttatatcacggtggaagtccgaccgtcttgggggactgccagactctaggctatcatccctaggcgccttgacgcgcagtgaaagcgatgtatttggcaaaaagccatgcggtcttccgtgaggctggttaggcccacttgaccagagaatttcgatcggtgcgagcatagtgcgagcggcaacgagtagaggaatgccaggtggcacttcatcatcaggatgtggaaacttgaattcctgtgacccgtatgaccaagcaaccaatacaattggcggtccatttccgtttcttctcctcggaggatagtggatggcaatgaggtcgtcctttcgcagattctctgctagatgaaacaaattttcgttggtgtcgctgaagccctcaacccaacctgtactcaatacagaatttgtcgcctatagccaatgttagcattatataagggacaatatacagatctggtactgacactagattcgcatagtctctcgtactccccgactgtgcataggtgtctaaaccaaacttcaatctgctttgttttcgggttcttggtcatgactagagatttctggatatccgtacggaagccgcataatctgaaagcaccgaggaatttccggtccgatcccataaacatattaacaagagcgtctcccttgacgcaccagtatttaccaatcttaatgcaagtggacggccgataagcacgaaccggcatccttggaaccaatggagcgatggaaagactaggttgagccgacgatctagctttgggcccggtgggaaccaatgctggagcattgactgatggattttcatctaacccagttgagtttgaagattttggagcaagccgataatgactcggagacgggctacgaggcgtgtaactatcacccatactacggagggaagaccttgacggccaaccggggggcggtgaccgtgatcgccgataaggtggtgatggtgacctgcgagaacgcggtgaccgtgacctgcgagatagtggtgaccgtgaccatcgagaacgcggtgaccgtgaccaccgagaacgcggtgaccgtgaccatcgagaacgcggtgaccgtgaccaccgagagcgcggtgaccgtgacctgcgagatagtggtgaccgtggccgtcgatagggcggtgaccatcgagagggcgatgaccgacgagagagctctgacggtcgataggtattagccactattgtggtgttaggctgcctgggggagttcgatctatattgttggactgtctcacggctgccctgcgagtctcgattctcagtaaccctctcgagattgaccattgcacggggcttagttggaatggctggcgagataacagtaagactggaacccgagagtagtccagcgtctttcactgaattaccttctgcacgccccccagatagaatgaccggagggaggactgagccagtcgaggccggaggacaggtagatgtgttgatattggcctgtggtgagggacggggagctagtgatggcgcagtaagggcggaggttgaccgcccgacaggattcgtcaaaggagcctcacctagagacgaggaagtagaggcaatagaatctacagaaccgggataggtgaggttggtctgcggaatggactttgactgagtagattgcggaggggaatctagagaaccaataggtctctctggatctaagccagacgacgaaactgacctagtggagcctaagtttgaagagcgagacactggaggagccatggctgacgagggtgcgagaagaacatgttcttgtggctgctttgcagctttatcgtctatttggccaatatgtgtctttagtagaccggtcaaatcgactgggttctcagaagcagattgattttgggcttccagggttttgggacttgttacagatgggccaaccactgagatggtgctgcctatgttcatccttggtggaaattcagaaggcttcatcagctccatctgtgacaagtccggtggtcgttcgccccatttcttatcacggtatgcgcgcttggcacctgggcctgtggcgaaagaagataatattggctttgctgcttgtggggggcttttctggcgcgcagggagtttgtacttggcagtaattcttttcgcaagctgagatagtcgcgagtttggaagcttgcttgaggttgtttctgtttgtgcaatggaggttcttggttttggaggctcgttcctagatgttgtcccagtaggaggtgctgtttgtagcagtgattgacgagccgcattttttgatggtggtggggtttcagctggaacaaacaaggccgaagaagcggttgaatccacggagaggcgattgggagctccgtgagacgaaataggtggttcgggctcatgggcatctatgatatcgggattggccagtcgagatgattcagtttgggggaggcttttctgccgtgccctttgctctcgtttgcgccttcgctcttcttttcgcttttttgttttcttctccaacaacttcatatgcttctcccacgacttgagattgaagggagtcaccttgccctccgcaatttgtttctttttctcttcccagccatctagggtctcttccgaagtaaacatttccttcggctcccaactgcatctgtccatgctgtacccagcccactcaaccaaatattgagtgataaagactccttcgtcatcctcagaatctggttctacgtagaacctccgttccgcatggatgtcattcacgagatactccgcttcctcttcactttgggcggtagacgccagagagtcgacatcaccaactccagaggcatcattcatctcagaatcagatgccatggtagtagcctagaaatcgagtcaacaaatgcttcattgtgcagcgtccaacgccccatgccaaatgtgcaagcaagacagtacttgggctgaaactttgagttgcagggcttcggggagagcgaatgcgtaccgtatttcatattcattagatctaatgaaaatagagggataagcccacagagacaatagcagaagtaaaagtaatgcgagcaagagtaacaacaagaaagttgatcagttactgcccattgataaaggataccgcccgcgcgccaaacgccaacccacgtgatctccacactaatccacaatgggtggacacgattaaggagagacactcggcccaggtatcactgactatcccctgctgattctctattacctcccgtgtgttcgctccccttgttttctttctgcctgctgcgaaatcaatactgacatatctgactttcactttctcaaggccacaagtacacatctcagtcttcacttgcccgccacgtttacctgtactttgatactacctttcgagctttactagctcgatcacattcaaaatggccaacgacgaatatgacgtgagttgatttgggaccacgagttcctccatgtctcagaaccaaatgctgatgatgatatcctctacagttcctcttcaaaggtaacctcgccacttcacgccgaggcccgccctcgtcttatcccaccatcccacccccccctttgccccatttcaaaagatccttagactgactgcggaggtattgtggagtgaatagtggtgcttattggagactctggtgttggtaaatccaacctcttgagtcgtttcacccgcaacgaattcaacctagactccaagtcaacgatcggtgtggagttcgcgacccggtccattcaagtcgactcgaagacaatcaaggcacaaatttgggataccgctggtcaggagcgctaccgtgcgattacttctgcctactaccgtggcgctgtcggcgccctcctcgtttacgatattagcaagcaccagacctacgagaatgtcaaccgctggttgaaggagctacgtgaccacgccgattcgaacatcgtcatcatgctcgttggtaacaagagcgatttgcgccacctgcgcgcggtccccacagaggaggctaagcagttcgcaagtgcgttttccggaatcactttctctgtgtggcgctgacattcagtaggcgagaacaatctttcattcatcgagacttccgcgcttgatgccagcaatgttgagctagctttccagaatatccttacaggttggttgtcgactccttggaatttattataacatgctaattcgacagaaatctaccgcatcgtttctagcaaggctctcgactccggagagggtggccagcaggtcctcgaccgccgtcccgttatcgaccccagcaagcaagacagcgagcagaagccgggctgctgctagattacccttcgcaaggacgaaacagcgactgccatgactcttcttttgcgatgtgacattgagatggtcttgatctgtatctgtgttggagtctgaaatttgactgctacaaagatgatacacaggcgggatctgttagagaaaccccacgggaagataggggtctacccaaatcgatgttaccggctgctggattccccttcttcagtcctttttttttttttgctcgttttcccagtgatcctcaacgaaattgatcccctttttctgttcgcttgatatgtttctacgatggtgaacacagcttggctgggcgtctaacattgcggctgcgtggcttttgtatggaaattctcaaattcgtatattcattccacctattttagtgtaattgtacaatgttgtagtcatgcaatcccaacaaccttcgaagagaacagtggcgatgctcgtcattacggttcacgtgctccacagggcaatttacctctcctggccagtgtccactagaagactgacaacgctcgctaggaggggttttatttacaatttacaactaagtgcctcatgtaaattgaatatttcctggagttctgcaaagaaaaatcaaagccctcgcacacgtatgtatttcgataatttcaaaaagtcgacaaacaaatctagtttaggacaatgcccatgtcacgatcagccactgcagatctaaattctccaagctcgagcccacgttcattcatgacatattccagggtgtcaccaaacgtttcaccgttgttgcggaaccattcccctagggaccagacgtactcctctacctgttccttcagcaaagcatggtcgcgcaaccataatatttgaccaggatcgagcttcagcatgtcctgcataatatagtaatgtgggatctcgtcaccccaaccttcataccccggatcatgagaaagatcattgcgaaaccgagacctaaatttggctggcgactcggcataatttcttgggtgagccgtgtggaagaattgttgaatcgaggtatcagggccattctgaagcaaggagtgaccatgggaagacatagaagtagttgaaagcggtggataattgagatggatattgaacgagagttgctggctgctgtctggataacgcttgcggaatttgcgttggatagtcccattactaggacatatgtgattctgaacaatatcacccatgacgagacgcaaatcctcaatctcggccagctcttgggtggaccagttgtggagcaactgagcgcgctccaatatcacatggcgaagactacgagaatggcgatcataaacaccagaatggaatgcactgtgatacagccataaccggtatactgcgcggcgtaggcgtaatcgctcttcgtcagtgagcgagcgacgattctcgaagtctagtttccattttttgaacgggtagatcgtctcccattttcgtgccaccagaccgagctgaatgacttgtttcagaagggaatcagacatgggcgcatgtcggataagatgagcagcctggctctcattttgcgtcaccacttgaatgacatcgtcaaggggaccatattcggtctccgcgacactggctaggatatgcagtttgcttgttgagttgaggatgcggtgaagtcgatggcaggtgattgataaattcaagacatcggagattgagttgcacgagcgaaatatgtggagtagaagctccgtcgcaagatgatcgattcgcataatggaaatatgctatgtagtttctgtaaagaagaataccgttagagtgactcatgttaaaggatcaataagtgatcacatacctgctcaggggttgttatttgtagttaccaggtaatttgaaagaagatagtggccaatcttcgaggatttatgtatgaatcaaatttaagtcacgaattgaagcgatcaacactcgtgtacttgtcgcgcgtacggtgggtgggcctattggatatagaccccgccgttggggctaacaggaggaagagacagcgtgggatcaaaagtaaacatattggaagagcaagctccttgtagccatgtagggctaaccaccaaaaatgatgccatgatagatggtatcaggaggcaaagagagattgggctgggcaatggcgagggagtgctttatatgacgcttagctaatgttgccccttgcgttcttcaaccaacctgctttccagttattctgaagaaaaagctctctagacagtaatgaaacaacccaaaacgaggaacagatagaaataatcaacttttgaaattaaccaggatgagactttgccccgacgccttaacggaccatgatgaaaagcgtcgcatcaaatatacacatgtagtcgaaacatcatcccgagggatatcaagtctagaaatagcacgacgaaacaaaaaaaaaccccctatgcaaacagcttccttgtgtccaacgcatccaccttccgcacagaattctcggacagtcctagatcggagcgcttggccacccgatcagtctggccgtctcggcgctgggagtaacggccagccttgccctgtcggatgtcgctacggacttggttggggctgacgtactccttgttctcgtagatgacgggtccaccaaagctgccttcgagaatcacaatgggggtcagaacgaaccgggggccaatctcgactagagaaacctcgggcagggcgttgtccttgctcttcggtacaggcttgatagtctcttccccatcctttttcttgccagcctcagactcgcggatctcatagacgcgaatccagatcttgccgtccactccaaagataccaatgatgcggtcgacgaatggcttcatgcctctgacaccacgtttaggcacacagaagactccgcgcagcatctcccgaacaagcgcacggtattcgctaccaggagcgcccatatctggaccttgctcgtcgaaggagcgatcgaacacgaccaagccgcggccgcccttcaagcaattccctgcaaatccagcgccgagctcgcccattgtgtgcaagttgttgagatggaacttaatagtgggaccattgggagggcgcgaaagccagagataaagatcctggccgttcttcttggcctcgaggaagaagataacgttgcacgaatgcaggtcggcaagagagttcaggaggaggttgtatccagcggccttctttttcgtgtcgagcttagtttctttgtgcgcatgagggaggaggccgcagatatcggacatgaggtgtcggtggctagagaaaaaaaacaaattatcagatcagtaaatccttctagtatatctcaaggcgcaatattcataccggtaagaagcgcctctggaagtcaagataagtacccgggtcttgggcataaatccagaagcaagctgtttcttcacaacctcagctgcctcgccatcgtcggactcgtcctcttcgctatcggtggtgtcgtcttccgcatcgaggagctcctccatctggatgtcctcgtcggacatatcctcagtaggctgtctagccgccttctttgagacactcttgtagactgatgccatgatgacggttgattgtgttaaaaaatggaattgaaattgatcgtgcaaaagacggccgagatcaaaaagttgatggcagaatattttttgtttacaccgccctgaaccttgctatgtcacgtgtcatatgggctactgattcatttgccgttgtttaccgccctgttttcctgccaaacattcatctggggattactcaaccttgctttggtcttattacttgctacccacatagttgcatacatatgtagcctttcatactggccaccttacgatttgcttgcctaatttcactccaaaaggtagactgaaattcaacgaaccgaaaaatatatatttcttgtctaaattgagtcgacaacacaacagagcgttaactattctcgattacagccattttgtttcccaaagattgatataataagtggcagacttgtgcattggctcaatattttgactttgaattggtcaatttggagagctgacgagattcagtcaagtaaaaggcgagtcagtatgacggaaagttcaacgctctttgcaggtttgcaaagccctcttgtgtgaccttcaagccggcaatggtatttgcaaattccaatttcttccgaaaatcccaatcatgatcccgatatacgagaccgtatagcaagccagcattaaatgtatctccagctcctatggtgctatagactatcagtatggtctaatgtgtgctgtggtatatcggaaaggtcaaaactcactcgacgactcccatttcctcagtatgtgccgggacatgagcaaatttgccggtctttggttcaagtgctgcggccccgtcatgaccccaagtacagcacagcaaggatctttaaacgacaggttagattatttctctggggacttgaacagtaaagcctacgctccgcttgtcttcaatgattgatcccgcaagcaatcctcagcgcatgtatatccatttttctgctcaactattagatgtgcttgaaaaacgtcgaaaataaatcttacctgggcccagcccttcgagtagataacaacgtctgctgcgtctgcaagcccctgcaagcctggacgacctggcttttcaatctcaacactgattttagcctctggaaaatgcatccgaatataatgaatacattccaatgtgacatctggtgcacggccctgagtgcgagttagcatgattcatgactagttgagcaccttgtcaacatttaaggtacctcaaaatgaaaccagggtcgatcagttacggcatgtaagggctcaacagctgctgcgaactcggggtgggtcatttcgggtagctcgttgtaattgacaatcgtcctactaccggtggcctggctcgtaatgatgtaactagaagctggctcactgaacgactctcggtaaatgcatttatctagccaaacctcatttcctaggcttgattgtatttgttgagatgccatggatgatttggagggaaggacagcaatgagatttaaagatgattcggcactcgacggcctatattgtaacaattgactcaaaacttccagagtgtttggacaattcccaccgcgccggcgactgatcctggttgcacgtagtttctcatcttcatttgggtaatagggggctctaccaaagcatgtgaatactggactttttaaatgccaatttcaagacagctgaaagaactcacgttagaattgtgtcaaggtagcacgcccctatagccactaaagccatgatgataaatccggcgagaatatatctccgtatttcggaaagaggagttagtattagggccgattgatcgtttatctaatgaatgtagttgatcgagtcgaggataaccgctgctttctaaggttaggtccacgggtggggttaaattagtcagcttgtcattaagctcactcgtgtggtacaattgtgtttgtcttagcacaaaaagccgtttcctagttttgcagtacataccacataaggttcacaatgaatcaaagagtctgaagctttcgtacacaatacaggaaataatttcatgtagtcagtatctaaaatagactagcaatcctcttcttgccactgagaagattagtcgcggactagggtaatacgcatcacgtgctcatgagaaagagcgcacgtgcccctttgcttaatacaactacctaaccttggaagtaggtatctatttgtcttcgcgtgctttctaaaaagccataaagaaatgactgtaaacatcaagtttcattgaagtgcaggtataaagaagtaggcgggatactgcaggacgaattgggggttgaataacgcaaactagattgctatacccgtacctggaggcatgcgattcctacaggtattattgtctcctacatttgcaaagtacaaagcaagcattgatgtggctggcaaacaattctcatgtcctaatgatcctttttcattctataccagttatatagccgatctaaactgttcatgaatcctcccagtgtcctcacaacctcatttttatcattctgtcactgagaccattttttcaaccatgggtcagcggcacaaagttttagagactgacactcccactgctaagttcctctacacaatcatcaagcaattggacttgaagtcggtcagtttattacccaactattaactgaagattgatttaatcttatctgaatatgataggtcgattggaatcgggtcgcctccgatgttgaagtctccaatggtcatgccgctcgtatgcggtactctcgcttccgacagcagatggaaggaaacacaggggcaagcaagccaaagcgaaagagcaagaagggaaagaccatggatccacctgctgagatgcaaggcatatttccaatggctccgccgctcatgatgcccaccatggcatcgattgattcttctcttcctggcaatccctttgtaaaatgcgagcctggcattcagggtaatgcgaacctacagagctttatgcaacaatctccgcagttgatgttggaggctagcgccgaaggacagtattactttcctcaggattttgcctcgatgcagttccagctggcgtcaagcataccatcagcgataccatcacctagccccgcaagatcatcgtccttcatgcaaaatccataccagttcccgacaatgccaactggctatcctttttcatcaccaggcactcaatctgggtttgatttgcgggactttgaccaaatgaaccctttcaccagttctgctccagccatcagctgggaaccacgctctccttctcgccaggaaggcccgactatgaaagccgaagaaggacaaaaacagaccgaggaagaaatgtcgagcgcaggaaatcaggaagatggtcatgttgttgtcaaagttgaaaagaatctagaatgattatgttggagactagaagggcctcgttcatatgttcattagctagtactctcgttattactaccaactatgctgatttagtcttgtgctctctctcacttgccaaagctaaacatagtattgtgcagaatttctcagaaagcagatggtcatctttatttaggcgtgtactcatagaccaatctgtgatagagtcatgagcgttatttcaagggaggtctctcttttagggaattttttataagagaaggctgagaagccaagcctggaccttaggttaaagttataatgcaggtcatcaacgtgcactaacgcgacaaaccttgtattatgtcactgctagattgccaaaagaatatactaagagaaaccagtcgctgattaatcgatgctattgaacaatgtatttaaccgtctcctggggcgacttttttctcttcgtcatttttcttgcaattgagaattcggtttattttcatatctaccctcattgaaggaggttgtgaacttccttccaatattgccgaaataatgccttcttacaagaacaacccttcggatgaagagtatctagactcgatcaagaaacataccgacaaggaaaccaacaatgtacgatacatcgacaacttcagtgaaactttcagttgaacccacagtcgacatactaaaacttgagccacaggtcaatctcgcccgcgtagccaaggattttagctatgctagtggaaagtcgtttcagaagaagtatgccaagctaaagaaagcacacaatctgaccaacggccatatctatggcgattacaaggcaagccgacttctatccgtcctaataagattgaaactaattttctcggtcagcctgaggcggctcagactcccccgaagaaagccatcaagaccgtcacggagattgtgcgtgaggctggggaagcatctgtaaaccgacgttccgccatgctgaagggcaaaggctcggagaaggataagaagaagcaagcttgacttgtcaaaacttgagtgaaagagttcttcggtgtgcgaggattctacgatcaggctgaaggatgggcgcccaaaagatgatagcctctttggaagtgtacttcttgatctttagatgaaatactgaggagaccgtgtagtaaaattggcgaaaattaggttacgaacttcgttaaaaggcgtcctcttctctcctctcggttctcaaaacggtataactacgagcgagcgaaatgtgaaaaccctaaaatcatagggagtggttcaatttggtttaaaagacaatccttcaatttggaatcgacccagacgatatttattcctagtactttatatataaagagggaataccggcttttgatacttgatggccacggaagtcatttaatacctgaattgaacgaaatttgcgagtaaaataaggtgataccgatatgtatactagcgcattcatcttatcttttgcaacctttaaatattagctgttttgcggtactgaaacgtgcgtacggtcggatggttgaatttaagatacggagtaggattaactatattaataaacttgacttcctcgaagtatacccccttctacgaattgaagcttttaaatcggagacgattaaaaatagcttcttagctgctggtctagtaccacatgtgctgaagaacccagtgtccggcatacccgacgggtctgcttttgccagtcgcactgagacgatgctatttcttgcgccgtcgaccgtcaaggcatccaagaagtcgtatttgtgccgctgggctggctgcaagacgtgcgctgtcggtccggatgttgtcactgtgcacgccgactgtctggaggtgtatctggagcatgcggcaagctatgaggagcggaaggagccgacaaaggaaaaggttggaaatgaggacaaggaaactggcaaaggagatgacaagaataaaaaggatacaacagacgataagaagataaacgaaacggaaaatgccgccctgcagcgcctctggatcgcctcttcgtggcgcacgccgtggaaaaaggcgcccttcctctccctgctccagtgcgacaacgcgcggatgtccatgcccagtccagccttgttacaccgccttggtctgcctggtatggcgcgcatgccaccagagctggccagtaccgtcagggacctgagcaaggatagtcctttgtggcggctcaacgcggccgcacgcctggcgctgtcgcttgccgagtacgagaagacggagacctacggtgacgaccctgccgcactgcccgcgtctatcctactatccgaggtggaagcctgggagagaggccggctgctggtacgccgtgtggtatcagacgagaagaaacctgagttggccgaggagaccattgcaacggacagcttcatccgcctcgcgatcgacacgtacggcctgctacacatcaagcggctgccggcccgtccggcctacaacggcaccacgtccgccggtaagctggcctatacgctctgcgaggcgaagacactaaacggtgccatgttcatttccaggtgtgtattggaggctgcaattggtgaaacggacagccggtagaatgctaacgacccagctcggcctcggccgcattgagctccccgcgggcctccccggcctgcaaatctgggacacgcctgcgccgccgcccatcgagggcgtcgcttatatgcgaaaacacctgaagcgcgtcagccccacgtcgtaccttcatgtggtcgaccttgaagctatcaccggtttgactcttctgtccgacggcaacgtgctaggcctccacgcccacacagtcgccgagccatccgccacagttaccgccgcccgtatggcgttgcccacctcgcgggttgcatagcagtatatgtcactggcgcccgggatcgcatcgaggccgtaggcgtgcgtaaggagggctacagtccgcaactaactcaggacgaactgacgctcatggtgagttttgaacgctgcggacgatgctgtagagaaaaatggtttgagagacgcttatattaattttccccgccagttccgcaagcggctctctggcgacacgctcctcggctacagcttttacaactcaccctccgaaaccatccttaccgcgccttcagaacagccgcgagcgctcgtatacagcgccgtcaatactattaatggcgtcattaccgacgtcggcgtctacaacgtggccgccgcgcccgacgtcaccgcggctgcttgggctaccagcgtacgaaacggaacgcgccgccactgctttaaccactcggcttacccggatgagcagctcaccgaggacgccttccagagcaacgtgccgttggccggcgtcacgtatatgcaggtatacaccaccaaagatactagcctcctgcgcagcatcatcctgacctacgacaatggcagccagcgcgcgctcggcatgtgctgtgtcgccaccgacattgatgccgtgcgcgagtacgcccgccctgtacgcctctgctttaagagtaaccgcgagacgggcgtgacgcgcttgcgtatcatcacagagggcgacctaggtacgccagccgccgatggccacgacgactgcgcaggcggcgaggatcccggcgagggcgaggaggccgatgacccgtatgccgttgtgcgcgcgtgctgtctcatgaccggccgcctcgagtttgccatcgacagcgacaggctttgcctggaacactttgccgaggaggaagagccggacgaggagaaggacccagacgacgaagatgtggatgtgtggtgatgggaggtggacaccgccagcactatcaccgttggagttgaactatcttgtgttaagccattagggaaatcacgactacgacctcacgtctaaaacgaggtaaaattggattttaactcatcctgtaaatctatacaactagctgagcaacatccaattttttttaatttatttcctttactcgcttctattttcaaagttgtgatgttgtcgtcgattcctacttcctcgttaaatatgttaaggacgggcgggtgtgtctttaggggcccgcctctggatttagtttttaggtaatggtatcatttgagtcttcaacaatgataatggggccaatctcctcggccgtgacagactgccaggaagggtctccggggatttcaggatacttgtcagagcggtcgaactctttggcattcttcacaatgctgaagtagtatctcctgctgctggccgtcaataattgcactaaaactcatcaaatccttgaagaacttacgctgcttcggggctcatgttgatgccaatatcaagtgagacattgtcccagtttatctatagcagccagcacgttagcaggtatattggattgtaggaacagattgtgaacatggagatattgtgccgaaactgaattggatgctacgtacctttgccttaaggcgatggcctgttcctcgggcgtattaacggaagtcattctagtaagaagatgaagctgagtcggatgttgttcgatgtaaagaagcacgtgatgctagaagttaatacgtagaatgtgagaagagcgatggagctaaggacttccagttgtctttagatagccattcaacgcgcattttgcttgatctgctttcagctgacaggtgttggctcctcccttaaactaacgtcactcattttgcctacatacagctttggataacaagaaaaatctgtgatgttcaatattataaaagatgacatggttatagtatcttaccaagtagggtgacaaaagtactttgattggcctctcctaggcatacttttgaagaaaattttgatatcttttatatttctaagagaataataatgatatgaagccagacaccttgaagccaagcagtcaaaattcatatctatgtctcttggtaaggcatgcattgcccatggtgtgactcaacataggcaacgggtacagaggtaacgaatttcattcataaagtcaaacaaacagtaggattgaacttatcaaaggggtatccttccaaataaacagaaaaaaaaagctgcaaagtgcatatcacatcacaaatgggtagagacagctaatatcttgacataaatctaagagagatcttcgttgagaagcgttatatgtctgccatgacagattccacgatcttccgcttgtatttcgacaaagcctggtcctttttgtgcatctgagtacggagtcttgtgtaacgctgcttccatgttgcctcggaaacaggatgactagaatcatcatcgtcaaaatccaggtttgccgtcttatcattgtcaatattctcattactcgggcccataatcacgtttgcatggtcaggcgaatccttccttcccatactaggattgagttttgcgagcgtgatttgcatcgaaaactggcttgaagttttgtactcatggaagacggtatagtggatatcactgaatgattctttagtggcagggccattcctatcttcatcgctgcttggtgtcgcacgttcaacgttgataaccagtgaccctggattagtgcctgcgagtccgaaatgatgaccaacaccaagatgtaaggccagtagcagcgaaggagtcccaaggtaaaactgtgaatataatgacgacaaattgatcaccatctccgaagccagagcagccgcctcgttaggagcaagattcgccgtctgccctgtcagcctagcacgaagaagctcggcagaaagtgcatgaacaacctcatcaatggagggattcggagtaatgaccgcatttctttgccccccagaagaagatatttgagtagtgataccattttttgtggtatctgtggtaacatgttggcggggctcattggacccttcagacccgggaacgacagcaccattcacaccattgactactagtctcggtggagaggcaagtctaacaggcgcccctgaatgttgaggaacctgcagttgaagtctattgggcctcccctgagagatagatgttgaaggattattgtgagttggggtctgaaatatttggggcggatttctgtcaagggcaattgaaggagcctgagtattagaattgggtgcctgcgatgattcccggctaggattgacctggaatgtagaaaaggaacccgatgatgaccctttatttggtggccttcctcggcctttcccggctgataatccgttgctattcggccaagcagacgaaactgcagggccatgtcgtcttctggaacgggttttttcacccgttgacggagtaactgcggaccgtggttccgcagacttgagtacatctgatggtagatgacttcggggaatgatagcagactgtggataactagcaggagaggcatcccgttcgggatgtctccagcgtatatctggattttgctggtccggccttgaaccattcggaaacgatgatgtcgccggtatccaggggtcattggattcagcatcatcaggaaatgcactgaatggaatcgcactctgtgggaatgccacggagtgggactgaaaactaccctgctgctgggcgcccacagatgtgtccaactggggccgcttgattgctctatcttcctcggtgtacctatcctcgacccttttccttcccctctttggcttccattgtggcacaagtgccctgagtgcaagatcctcttccaataatacaccatcgcgagattcgctaacaaaaggaccagatggtgggagctgtgtatagtaagaatgaggcagtcccatacaatattcaaagaaagcatcaatatgcatagcacgcatccatcgctgggtgagattagcaaggtgaaatttgggttggaagcttggcagacgtactttgaggcgaacagtgtactgttgcaccttctgggtgctttgtttcttttcaaggcaaggtggttcaacacccaactcaattgctaattgaatccaggtcttcaactcttcattctgcagccgccttcgaatgaggccatatagggtaaagatgttgaagctttttccatcactgcgcggcagacaccggaaggtctttctcagatctgatgtgtcaaccgaggatggaacattaggattgcagtacaagataaatgaaacataggcgtcatcaatcgtttcatcagtaatatcccgtgacggaagagctcgggaatctgcgtgatcggcagaatctttcataggctgatggcgacgaggatcaaaaactggcggagacatggaggccccggagcgattggccgatgatgggggtatagcagaatgcatgcccctcggggaagactgtaagctcctgggggtttctcttcgctgtaagggaggcgatttgttgatatctatttgactacgagagcttcccaaggaggaagcactctgcaacgtcgattccaaggtcggaggatatcgcgcatattgttgaatgaccatttgcggtctgccgagctcaccacggttggagcgatcggtagagtccatcatgagaggaaatgatgttttcatctgaatcttgacgactcggagtgtcagaactctatgtttaattgtagaatagagctagacacgcgatgcaggcaaataatcatgcggatcctatgtcgcataggcaagccgtcattatcgtcaaatcaggaaccgcagcatagatgtaggctatcttcaacacaaaatgatcggtgaatgaatacaaagagagagtgaagagaatctgattctgaacagcaatgcgccgatggtgtagggttccaggaggtttcccctcgaggtggctggaagcgcccatctttaaagctcaagctgagaatctattttggggccatctagtgctccctaatgaggactagtgttgtggcctgagggcggggttcatgcctggatatcacgtgtagactaagcctaattggcgttagcgcccattggcacctaccaggtgttatcgataagcttgtcgtcttggcattcttccaaggttggcctcttcgacctcatccgtcaaaggaaccggactcccccggactgtggcaaggttcaatttgaatgataattatttcagaattttcgcgccacaagcctagaaatattcatctccggcttgtattgttgcgcgcgcgacgtgcgtacaatgtcgctcgggtctctgctacccactctcttatcctagcgcgaccttatccgtcatggcgccgccctcgagttcgcgctcgaggtccactcgccctacgcggtccagccgcacaaaggtgcagacctaccacgaggaaagctcctctgacgatgaatcggaaggtttgcgtagctcaaggcgtgcctcgttatctcttcgctcgcgaatgccgaaatcctatcgtgaagattcaacggatgatagctttgattttgatggagctgtggaagaccaggagtccgaagcatcggtatctgcgccgatcgacaccccaaatccgaacaccgaatctgtgcctactcgtccttccaaacccaaacgtcctcaacgcgctgcgaccacctcgaagccaaagcagactaaacgatcgaaacccaccagtcaagttgggagagccttgcataaacgtgtcaaggcagatgaggatgacccgatatttctgggatccggtgtcattcctccttggcaaactctcccctaccaaattcttcttgacattttcttgcgcgcgtcgtatccattactcgacgaaagccgttccgcccgcaatgactctgtcaagtggctagtcaatgtcgctctactatgtcgaagctttcacgaacctgcgctagccgcgctctatcactgcccccctcttcttcctgcctacaagagccatgtgctcctctctttgctggcacgaccgcaagagtccctctcgatgaattactctagcaagatcaagcaactccatgttgaggttgaaccagtcctcctctataagagtggaccctacggatacctcgaccttgctcagctgattgaaaagacacctcgtttacacacggtaagactgtatcacagagatgattacacagtgggaatacccccatggcacattgctcaatcaaagtggacttatccagacgccatcttttccgccatcgagacccgtggcattacccttcgtaactgggactggaacagtcgctttttagaaaccgacgagcttgtcagattgatggtgagaatgcattcgctgcgtgccttccagggtctcaggcagctgaagttgctccactttgacaattccaacgaggaaacctccgctgccaaggaggctgctctccttgaagcccttgatatgcttccagagcttcagcgactggattttattgaaagctcattggtcagcggggaaatcctggccaacctaccaaatacactccgttcactcactctgaacaactgtgatcgattgtggtcatcagatctaacagcctatttgtccttgcatggcaccaatctccgggagctcagtctcagccacaatcgccatctcaacatgtctttcatccaaactctggctcagtgctgtgagagcctcgaagttttcaaaatggacctttctatgcatgatgcgtccagctatcacgatgtcgagccgcacttcgaagatctacttgtcgaaaccgaagttcccacgtggccagtgaaacttcaagaaatcgagctcactcagttacgcaaatgggacgacgctactgcggaggtctttttcacctctttggtaaacgcggcaccgcaacttcgtgatctacgtcgattggtcataagtgcaatcctgaagattggttggcgtgaccgtgccacttttcgcgagcggtggatcggtatgctcgagaaggttttcctgcgacacagcatgccgccagaccccaacctccgctcccttcagaagcgctcgctcaaacccaccacattcatcacagcgaatgaccccgatgaacttggtgttggagttgatgatccacggccatccacggctgatggtggcccgtccagttcttctaaacgccaaagcactcggctggcacatcagaagttcaacataattgacgatgctgctagcagttcttcgttggtgcagcctgaaaccaggaagatacagggaatgtgcgatattgttaacattcggatcgacaaccagcgaccgaccgaactgcaattcaacgagaatgattttcttgacgatgaactcagtggcgacgaggactgggctggcgatgacttctagccaatcctagggagttcgggtaacaagctatggcgaagtcccaaccacagtacctttctttgtatttatagccatgtcgtctctcggagctgtattatgaccctagacgaacaggttcttttttttatgccgatatgtttctgggatctggcgctggggtttcttattcatttggaagggggttaaacaggagctactattcgatactctctatacaattaatacctagcgattcatgcgactaagtatttggtgcggaatacatgattgcttgctggaccataggcatacaacatgtcgtagcagttgcgttcatgcgttgttcactcggtctgtgcacgacgatccaaagccaagccccacgagatcgtcttatcggcgagtctcgttgaacctcaccttacatctgtttattcctacacctttgtttggtgtataattacattttatccgttcagatccagaatttggatgtcttgtgcttttcctttcgacattctgacatcggctggatcctgttaggtccaagatggcgcctgaggcccctgcggacaccgcaggcccatcctccccaccaccccaacttccagaaggctggtaagtcaaccccaaaagtcaaagaattttccagctgtattctaacaatcatatcggataggctccctcaatgggaaggtgtcggacggaaatggtattacgtacagcggacgactgggaagtcgcaatgggagattccgaccgaaccgatcgttttgaccccgtcaacaacaccgacgccgagcggggcagggctatcgcaggagccaaaatcgtatccgacaagcaacaatactcgagagttggagtccacggacagaatggcgggcgagatgtactctgcggccgacagtgcgaaaatttccgtagggaatcgcgctcattatgtctgcgtaagcattgcaagaatggcactgatggtgggatagaactcccttggctcccagatatatgggcagtcggaaaatccaacttatgggtcttccggggtaccgggttggtattcgaatcagacgggtcaacacttgcccggcagatatgagcagcagatggctgcaaacgcagccggatatggcccggtatgttcaaatactcgcgtcattcattgattggccgtggcgctgatttgcctctagaatccgttgcaccagggtcctgttggacatttgaatggtgttcagccggcgttctatggaagccaaacacatccaggttatcaaatcacgggtccacaccacataggccaaagtatctcctcatcaatgtggggtaataattcaggtacctatcagggaaacccaggcagttataacatgacacaacatgcacaatccttccaaggattctctgctgatcctgttggattgcataatcaccagccaccagcatcctggacaataaccagcaatccacagggggaaatggcaaggtcaattggcggagcttccgattcccaaccacagtggcaattggaaccacagcaaggtcatttgaatggctctggtgagggtgtcccgatgaacctacacccatcaaacatgactaagcccttctttgggtcttactcatcgaaccagcatgcggagccgtcttcgagagaattcgctcgtcgtgtctcgaatccttctcttgttcaggaaggccaaccctaccaaacttccgcggagaacttccacaaccattcaccgcactccatggttgaacaaggtagattcggacaaggccaggacccacgttcccattcacagcgtactacgtcggaccctgctttgcagggattctcaccgctgcaacatgtacagagtcaatatcaacagcagcacatgatacgaaaacagtcaggaccacaccaagccaatattgctcaaggccatcagcaatatcacaatccaatcgcacaagtcggtgccaaccaatacgtttcgcagcatcaatttggtcccaacggcgggccgacgggtttccctgaaacaacgcatgttcagcaagtcccttatcaccagtcgagtcattatcccgagcgtattgaacattcacccgggcagacaagaagaggttcagagtcacactttgtcagtgggccgtggacctccacgccgccttctactggacagtactaggcaacaatttgttgttcacgttcattattatggtcaacgggaacaaaggttttaatttctttttttgagcggtttctatgggcatgtctatcttctgcgctgtttgtgtttcagtatagattccccagtcgatataattcgttgcttcaattgagttttgtgccaaacaacattccgtctagctactacaaattcccgtgcctgaacacattacagctgcaagcattacacaaatcaagtattaggggacttcttgaacctggaagtatagcggcctacataatatcaggaacgtcatgtaatccaccgcctgggatagaacccaataagtacatagcatgaggttcaagtcacagatttcatcttgatattacaaaggtcattgctcgcgcggaggaaatctcacaaacggcatgtgaggaagattttcattgttctcttcattttctctaccacttcttctttctacgacatcaccaatatctcttggtcgcccaatcatccccccttccatcccacgagcttttgctatcacaatggctagtacctgggatcacgaaagagacaagaaggtaagtttgctcttttcagggggtcagcagcgacaccccccgggatacaagttcccagcattggcaaggtctcggtatcaatagctgataattgatagttgcttttagccattatagccgttcattctccgctggattatgccgcaattgccaaggcgatgggacagggtaagtatatacctgaggactatacactgaagccacaattcccaccctaccctttatcctacatgaccattatacgaactcatctgacgaagtacaggcgacagcactgccgctgtgaagaagcacgtctacactctaaaagcccgccagcgagcaatctccgcacaatctcttgccaaggccaagaccgacaaacccactgactgtggcgacaagggtaccaaaaccaccaccaagcgcaagattgactcgcccacaaagtctgaagttaacgccattgtcgagaatcaggacgaggatgggtttgaacccagcgccagccccaataagcagcgcaagctctaagatcttccgcttcttgggcctggcattcattgggaggtaatgacttacattctgatttttatgcagcgttttctgccgcatagcgaggaaagatgtttttcggcctttggtctagggctcttaggtactttgttatctgcgtgatgtcttgaaacacagcacctttttcgttaatatccatttcccaagaaagacgtagatttccttcgtcgcagtagccccccgatgccttttcagtatgaaaggtactaagtatctacgtagaaccaggaaatataacctcaccgttgttttatgctacttctgacaacccaaggaactgatccaagtaatggtatgttttttaatctttggttatcatcttaagattttcccgtttcttcatatcctcctactcatatatatagttccacttcataaagtcaattaacatcccactcttagtaattttagagatggcgatggaaagtaaaagaggatagagccacttgtttgtgccccgttcagtttcagtcgaacattccccctttcactctccataaattcttcctctctcttagaaacagtctcctcatttcatatcaccactattttactagccggtacgttcattttcaatttaatctatgagcaggatatacttctaagcatcttgagattcaatttatgctcttgatttactcgtcacttttgttcataaagatactgatatcctttgcctagctcgttaacgaccgaagcaacaatgaaggtcacgtggaatgaaaaggccgatgccaaggtaagttcatatttaccttcgttatcgatttaccattggtttgttccatatccttgatagtcttggtgactgcggttcaagcggtcaccttgcggccttcactttgacgttggtgtgacccgtgacggcgatggtttaactccaatgctttaatattggtctagctgtctcaacatcatcgttgtatttcaataattaaccatcataactccagttactggccggcatactcgccaataatcctaccccgattgatttcaatgctcttgctgagtatatgggtgatggttagtgctaccctgagaacccccaactcccatactgcagtctttactcggactatagcgcatattgtttatgttatgcactttattcatggccgtcacccaaccaactacattcccactggtcctctcccgtttgatctttgccatacacaattcaacttggaaatatgtttcaatcgcctataccctctacccaacatttttcgggctaataaaggaactatgctaagctagacttataggagtcacagcctgcgccatccggcaccgggtaactcgccttcgggctaaggctgcagagatgaatgatggcagtagcacctcttcccctgcttcgcccgtgacaaggaagcgccagcgcaggactccaaagaagtctgcaaaggttgcaccggcaaagcacaaggatgctgatcccgaatctggtggagaaggcccagttcccgaggatgaagaaatcgacggtgaagataccaatgacaagaagtgcaaaataaagcacgaggagactgaagagtaggtttctttaatttgtgaggatacagatggaaactctgagtactaattttgtttgatcaaggaccttcttccttgacggtatcgtcaaagaggatgaagattcctcggatctctaaacgccaccaccgcgactcttcacagcgaagccctaacgcgtcgatgtggtgaaggtgtcagcatggagatagtatctgaattttagctggggaagtttttcagaatctcacaaccggcaggaatactagcatatgcaaaagggttatgagcagatgaatttacagcgaacaatgagctcgactatacgtgtctccttgctcgtaataaaatacttttactgatcccagccattatccttttaacttcatacgacaagaacaggataaaagtagacgacaaaaaaagtcggctgtcaattcagctatgtccttcggcgcaatccaaataaatgggcaccgggcttttttttgtatttttttctttttccccccatcacctcacggtggaaacaaaccgagttgttcatcaaccttttttttttcgatttttccttcttttctgacgaccgggtcacacgcattgttggggaataataaagcaccccaaaagaaacaaggagacccaacgtcaagtaaaacgcaaattcgaatattgaccacgggggctcaagtcaccgaaatctcaagcgactgacatgaatccgccttgagaatgaccattgagctaattgagctggtcatcggagtaggcgtcctcctcgttgtactcggtccattcaggatcgacctttttgttgtcgacatcgggggatccctccttgaggttccactgaagaaggggggcgagaccctccaggccggcttcctgcttgatagcggactcatcgagagaatgctcgtgcttcgcaggcaattcttcctcttccctgacattgacttggtcttcatcggcgatggcgttctttgtgacgcgcttgcgcttgcgggaagagccagcaggagtaggtgtctcattggcctttttgcgaggggcacgcttctttggagtaaccgggctagagggtccagacaccgccgcgacattgccattacgaacgttctccctgattttgttgagacgttccttgagagcacgaggtgttggcctgtgatcctcgtcctcgacggctgatcaaatgttagattgaacatttccagtgatatagagattagttgtggctgcagaacgaaagacttacgccaggcctcggcaaccttggccacatcgacactcaagtcatgggtctcgaggattttggcaaggagctttatttgtcagtcacaattgtcattgccagatatgcatgcagcccatgaacatagaaagtcccagcagacttggaatggggaaagaatcttgaaaaagacaaggaaagactttcgcaaacaaatttgtccaagcagctgaggatgatcaaagcaaaagtcaatctgaaaggcatttgatatggtcatgcaggaaagtatgaatatccacacccctccttagacaaaagcccaggacaattcaaaagtcatagcgaagtgaaaaagaaactcacagtttggtcagcgatcgaatcccatttcactttacccatcttggcggtgtgaacagtttgcggtagatagtatggcaggataaatgtaagcttgatatgtttcaaatgcaagtcggttatgttctcgtgaatgaataagaatggttccgagttgcgttgggtagaagagaggaggaggaggaggaggaggaggaagatccgagcaaacaatttaaagggatcagattaacgcgactggtcgtagattctcggcgcttagtcgtcgaggcaaacgatacaaacgaacctacgcagacaatgtgacttcacaggtatgatttcaggtggaaatccatcttagttgtgtagatacactgcgtagtggttatccaacgttggttgcccatgatggcccaggcattaaaatccagatatacatgaatacagtatgtagcttctacagttcttcgtttgtcagtatttacaattatgtttacacaacctaggatctgaacttgggataactatacagtgcagtggtggattctagtacatgatgactaagcggcaccactgaggctaacgcagacaccttccacttctcttcttggtagtcaccccattgtgttctcctctctagtaccctactgatcccagtgacgactatgctctcatatttgtttcataggcagagctgtcggtgcccctgcttgtcccctcttcaataggtgtctaagcaggagccctaacgctagactcgattaggcaatacatacatcaaatttacatacaacgctagaggatccaccaacggcgtagatcaacctctctgcaattctaacggccctgtaggaaatcggagactaccttcattaaaatagactaacaagtgatctgtctgatttggagggaaataactatgtaggtggctattatggcgggagggaatggtttgtcctcagttcctcgtttggtccgtcccacatcgctctgatctctaaacaatattcatatacgacattatatattccagtcattcctctgggcatctttaggcctgttcattttgcgacacgtcttctcataatccgagttggggccagtggtaagtcatcttgcccagataagcctggcgacgcaagaagacggttgctgactttattcactccatgcttagatattgctgaattacgggcgttcttctcaggctcattttgctcaactgactcacggatgcggttgaatccagcagggtttcgtttacccggataaatgggctgcacattttcataagctccagaggagtcggacaaagggtcggggccagagtcgactattccatcagcgggagaggctagctggtgatgcaatcgtttggagacaagtttggtacgtctcattgtcgaaggagatcggtgacggtatttaggctgcgatacacgttggggcgatgttgatcgagtgcgaggctgagatatgagaagggattcaaggttccgactggtgtcttgggttggctctgtaacacccgggcttctttcgatttgagacaaccccagggtattcgaaccccgcgggtgcaaggaaggcttttgtgacagcgtgagttgtttcctgacgtatgaattttgttccgatagggattgatgagaaatatcttgatgattaggttcaatcaccaagtcctcaatcccgagcttgctagcatgagaagcatccagtcgctggtcaacttctggagacttctgccgccaacctgcagcccgccgcttcacagacaaccatgaatactcgcgaccggtctcctcgtgaaaccgtgacgcgacatccaaccagaacttttttgctggcaactcgccattggacaccgcgggcaatttttgttcatagagtcttttcagaacgccctcttgcgcaagggtaagtttcttgccacggccggtgctggggcggtgatcgactactatatcgttgagtttggtcccacgggctgacgcaaaatctattgaggccatcgctggagccggtgccgagttgtggggtccttggtttaattgacgatcatctggtcttgttcatggggacgtcacgctgccacccggtcggatcgattgacttgaattcaaatggatagcccactggacccacagatcaaggagattaagaatgtcagtggctagattcgagccgaaggaagcgtggatgacactggaagtgggtcggaaagatcggaggccnnnnnnnnnnnnnnnnnnnnnnnnnnnnnnnnnnnnnnnnnnnnnnnnnnnnnnnnnnnnnnnnnnnnnnnnnnnnnnnnnnnnnnnnnnnnnnnnnnggcgcgccgcgtgtcgcgtcgcgtttaccccgcgttttcaatacggtcacgtgattatcccaaattgattactccgcataggtttcaattctatctagcacaatctcgagcacgtttccactcataaagagtgttgcgggggactccgactggcgatacaattggctttggacctggagatgatgataactcaacacacaatatagcagttcgagcgcttgtgtacagaatatcagcagcgtccttgatcagcttcagaccatgtgaacaagcttagcatctgtagggtcttcttcaacatggacattcagattcaatgtgaggggtatatacgtatatgccaacgatttgaacatgtgtcactcaataagcactctcaagaatacctcccaacgccaatagacaagtaaaattccacgtaatcagcattcatcaactcaagagatcaaatctgtcggaccacctaatggcaaagctgaatccattgtgcaataatatcctccatgtcatgcgcaataccccactgtgaagacaagcaccggaaaagcttttgcatagagttgagctcgtaaagcagattcctgacaacgccaccaataggaagtggaagagaggaagagctatttacattctcgacaaagcgctttgtctccgagccagatcgaggtcggatatcctcgtcacccaggttgagatccgaatgcgatagcaatgcatcttgccaaacgatgttgcgaggtaaattcacagtggcgactcctgcgagtgaaaggacaacgtatattgtcgctgctgcaaacagggagctaggcatatgcacgacatgcgcgcggccacgtggtaattgctccacgatatcttgaatggcgaccgcatggaggacggcccgccgcgcgtcttctgaattagcccatttgattagatcaaagcccgggcggacggttccacatccaccggagatgtgttggatgatgttgtagcgcgagcagacgtggcgggagaggacggtcgagttgatcattgtatctaggcagactgtgtgccaacgcaggagaatttcgagtctctctgctgcggtgaagtgaatgctcatggatattgtctcgtggacttgagctaaagctcggcggacgtcagattggctaggaactcctacggctagttcattgtcatcaaaatcggagatcaaggactggagcccttctagcaccacacgcagtgcgaaggcagagaaatggtactctagagtccggaagctccccaccggtgggaaaagggagcggaaaattgtcctaaatgaggactgatctggttcttgggggtgcatgtgggccaaccattcatcggcagtgccggcatcaaaggcttcctcgctacttgggagggtgagggggtttcccacatgacgagaggaggcaccatcgctggaagtttgatccacgagcccgtccaagacgtagtaggctaacagggtgcgttgctggatctcccgcgcagcccagattcgccactggtgttctttttctgcagcgggagcatccatcgagggcaagttgtccattgagtatggctcgctgtcgtacatcccgcagtgtcttgcccataagaagcccagtggatggaatacttggctggtggttctaattgcccggttcttggatagcgccccatagatctgacccagtagtgctgtgatcatcaactgaactcccttgcaggcatcatagggtccattgtgtgtgatcagagactgccatgaagttgaaattgcggtatgtgctaggtgccatagggcttcgccttttaaaaccgagtccttggggcctaggtacaaagagccaatggcgatggcattaaggaggagagcatgcgtgcattctcggaaaacaaaagttgcacgatgcaatattgggaatgtgggaatgaagcgggcgaagaacatgtggagacactcgtcgaggaagaccgaggtgatggacatggatttgacggcggccgtaacactcgatgactagggaaataaagtgtcagtttcgatcaaatctcggtgcaatatgtcttatgatcaaagttttcaacagccctagtttgctcatccagcaaaatacaacgctcaactcaccgagctcgtgaccatctctgtgacatctcgcactgcttgatgccctccaccggacagtatcgccccaacagaagacctacggtcatcgaatgaattcggggacccaaaatccatgccattcatatcctgcacgacaggtggaaaaggcaaggtaccaagcggaatctgccaatctgtcgtatccgaggacattaagctctgaaacaagttttccgaatcaggccaaaccaacgcaaagtccaactccgagtcgacattatgcatactcgcatgatcgccggagtgggactcctccaaggaatgacttgttgctgaagttgacaccggatcaacagtggaagcactcctcgtgtcccaagaagggagagaattgaaagaggtaggctgcggcggtaagtgggcctccgaatagtcattctttgcatttatagcacgaacgtgcagcttctcatgccgagtaagagcatcttgtcgggcaaagggccttcggcactctttacagatgtatggtttagatcccgtgtctaagttttccggttagctgggcattgctttttgagctttctgtggggatcataaattattgggagccctgatgaaattggaacatacggcagcgctcatgtctctataaagacccattagttagctcgtatcacttggcggtccctccttcgtggggaagtttgagttggagccaacgttggaagtctactcaccctcaagtgttcggccttggagaatgctttttgacatactcgacaaactagtttcttgcctcctggcagtgcaggcggcgccgtcattatccctattgacgccatttttgttcgataaagagaaggggcagtaggagagtaaattgtggagaggtgattgtggggtgtggcactgcttatgcgatcacggaatttcattttgcctgcaaccccaaatagatagtcaagttgaaatatatagatactctagttacatgaatgttgatctaaaatcaagcaaatgaagaaagtcaactacctcattttgcaaaccttcgtgatttagaagaacctgtgctcccagactgagttcttatgttgtaaaataatgccatagttgagcgtccaagccttcaaacttttattacgccaatagacttattgctacgcttcgctccgcagttgtactaactattctttctcttgcttcagctagttcggtgagaaaatatcatacctaagtatcctttgtatggttaagtcatacaaaagatacctagcttctagatcttgggtctatgtttatggtgttgcttggcagggctgtcccttgtaagcgttcaagcgttcaagcggaaacatcggtcgtggcaatacgaccaaggaagcgtggctactatgttccttctccccctatttctctagactgcatcagatcggcaataatgctcagaccaagttgcatatgtgtctcgcgtcccgcggctggcaagcagcattgaaaatgccgtcgcgattggggtttccccagctgaacggtgaatctagcgaaataaattgctaaaccctaggaaaattgcgccaaggcgtcgaaatctagagcttcggtacttggctcgggatgaaaaagtcgaactgcatagtaaaaagcttcatcggctagccgtgttcaagtgccatggcgatgctatatagaagaccccatgacagcaatttctttagcggccttctaactcgccggtaccgaggctttccaatcaggaaccgtggagtgcctccgcatttctcgccattttctccccattttctcccccgaggacccgcaatggagccgaaaaccccggagaataactaccccaggcgcaggagagctccgactgggcaaacgcggtgggattagtgtcttggctatgcacactcactctgacatttctcagaagccttcagatctgtggttattagtgtttgccccggtgccctcaagtggctcaccctgagccatagtttttcctgtaatcctcttatttaatacccccactccctttgactattctcacgacaatcgacacatcgcctggtactgagaccacctttttaatcgggggaacgcgagcagaatgccgtcctttgagttgcaaccgagctcgtctcgacgagacgagctcgaggaggtgccaggcacgaaagcggacatcgatctcatcgagagcgcaggaaatggacacgcagtcacttccgtcgagtcaatggttgctcgtctgccaaaagcacaccgcgactatctgatggagcgacacgggactttggaactcgatcctattcccggaatgagtccagctgacccttacaactggcctgagtggaaggtaagtcaatattctccctgttacaaaatcttgaaacgggacaaaagcaaatgatcccgtcggacagaatactgatatgtcaacgcgcagaaaatgaccaaccttgtcctcgtggcgttccacgcctgcatgggcacatttaccgccgccggcattatccctgcctttttagatatctccacagaactcggcgtcggaatgcaagatgctagttacttgacctctttgcaaattgccatccttggaggtgcgcctctattctggaagccgctgtccaacaggtatgggcgccggccaatcttcctcctctctctcatctgcagtcttgtgtgtaatatcggctgtgccaagagcaccacatatgcctctctggctgcttgccgggccctcgtggcatttttcatctcgcctgcctccgccattggcagtgcggtcgtgatggagacaacattcaagaaagaccgtggccgttacatgggtgtttggacactgctggtcaccctgggtgtccccgttgggcctttcattttcggcttcgtcacctatcgcgttggttatcactggatcttctggatcctcgcaattgtaagttcacattcccacggtagtcaatactctattcatgggctgatacatctaaagatcaacggctgccagttcatcttgtatctgttccttggccctgaaactcgttatctgggcggcggcatcgacagcaaggagtcaacgatgaagatcgagtacatgtcactgcgacggatcgaccccacaccattctcatggttcgagttcatccgtccactgaccatggcccgacacccatcaatccttatcccagcgtgcgcatacgcaatggttttcctcttcggcaacattcttgcaaccgtcgagattccccaactcctgcaagagaagttcgaactcaacgccgaacagcttggcatgcagttcctaggcgcaattataggatccgtaatcggcgagcaaatgggcggcgtgctgtcagacttctggatgagccggcgcagccgacgcatcaaccgcaaggccgagccggaattccgtctgtggctcagctacttcggtttcgcgctcaccataatcggcatcatcgtcttcctggtctgcacgcaggagtcacccagcggacactggaacgtaacgcccattattggcaccgctattggtgctgtcgggaaccagctggtcaccacggtaatgatcacctatgctatcgattgcttcccacaggaagctggtaacattggtgtgttcatcacgtttgtccggcagatttggggcttccttggtcctttctggtatgttttctttctctctgcgtttattttgcaagttcgtcgctaacctcagctcaggtttgctcccatgttcgagactgtcggtatcgctcccagcgcgggaattggatctgcgctggttgtctgtgtcagtgtcattcccaccatcttcttgcaatggcggggtaagggttggcgtagcgaggagtaaaggcactgggatggaaattgacttcggtttcggtatttgacgttcacaattttcgatattattgtctcgggttgggttttgtagagtgtatcagtgggtatgatatagagtgatagagtgatcgggttcgggttcgggttagatgagtcggcatcgaacacggcaacgtggttctagattgcatataggtagctaggccaatgaatgattgtatgattcttcaaagagctttggcaatgggcgagagaaaatacacttggttagtacataacagcagcatcaaaaagacaagttgagttctgctcaagaaatcacatcgccatctgtagggatctgtagggatgtgtatagaggcataaaaattcgatatcacctggaacagcaacactcctataaagaaaggagtaaaaattaaagagaaggattttaagtcaacaatagagatctagcaaaaactcctttgagaaaaatgagccggagactatctcttaaggaccactccgggcgggaacagctcgggacaccgacccgatataattccgtagcgcgggtcaacgaggcccacgggcggccctggcagacaattgacaactgccgggtgaagagtttcttgcagccctgcttaaatgttaccagcatgcaccataaatgaaggagtgagatgttattcctatacagttctactatggggtttatgctatacaatcaaacatactagtatgatagttacatttgatcagtaaaaggccaagcatcaaatccaaggttttgcctttttctagacactttagcgagcttttgtctacaacacagttgtccgaagttatacagggcgatgtgtgggagagacttactccgggtaaggaaaaattcatttccggttgggttctgtgattggtcaaagcttcgcgatatagctgttgactcgcgtttttgcagaatcccttaccttgtggtttggagccaggatttgaatatatctatgttgtagttcgttggattggatggtcattattagtggccgcctttattgcgccgtatatagggaactttggatggttgtgcaggcaatcatcccgcatagagtttacgtgactacagcatgtatatgatttcacagttgccagagctgctcaaagtcattgactatatacaattggaaagtattgtttcagaaagtcaaatctatcgttttatattctggaatcatcattgatgctcaatcttattgataagtgtcccaatgtgaggcagcaactcaacggcaaactcgtcgccagccttgaaaaattccttcggattcctagctgctccgacaccgggcggagtgccggtcaatatgattgtgccggcaggcagggtggtgccttgggagaggaagctgattagttgagggacgctgaagatgaggtcactgcgatgaaattcaatgttagttgatgttactttgtatactagaagcaatgggaagcaaatataacgtacgtcaaggggcagttctgcattatgttgccgttcttgagaccgcgaatctgaagcttgctggcatcagggacgagagcagcggaaacgaggacggggcctatatataccaagtcagtgtaaaattctcctggatattatacagtccatgaacaaaccaatcgggcatgcgccatcaaagccctttgaaaaagaccactggctctgactcatctgagaggtgcgactagaaacatcgttcgcagctgtgtagccaagaacgtagtcgagggcctcagactcgggcacatccttagcgtcacggccaatgacaataaccatctcagactcgtagtcgcctgtgttatcttgctgtgtaatcttgggcagaactgttggtgcaggccaagggtcagccagagagctggccggcttcatgaacaatgtcgggacttcggggattgggagacccatctccctggcgtgggaagcatactatagtgcgcattagtaacttcatttctcttgaatgttcctttcatgattaaaacccacgttcaagccgatacagcgaatagttccaacctcgctttgcgccaagggggacagaatccgcgcgatggtctccgtcgcatcagtcacctggccagggctcaggactgaagtaccggagaacgggcgcaccgaaacctcctttccctggtagagagccaatccaacatccaacttaggatcgacgggctctccgattagaaccttggtggggtttgacttagggacaaagcgcaccaagcctatttgccgtcagtctggatatccgggtcaatttgagagatttcttacgcgaaaacgtagatgcgattttggacatgattgtattatttggagaatcaaaagaggatacaagtgaattgaagcagaaaccccatatataataagagctgtcgcgaccgatagcggagtatgtctaccccggcactgtataagccggaggggcagcttcccacaatgtggggaagtggcgagcgcggccgatttcagcttggagaataaaaagaacaaaatccccgcgatggtcatggttgtgtagtcattattcctatccgtatcccaccgtcatgtctgctcctaaaggtcccttccacctggttagtgtcaacaccgctccggagcgcgccagacgcctcatcggccgcgtcgccgaggctctgagcgatcggtacactatcatccacgtcgacaactgcgagagtaagcatattgagcgtcattattgagtgtgaatctcggttgacagagtctcgcgcaggaatcgacgaggtcgaggccaaggtcaagcagcacaacccggaggttctggtaagtccgaacttcgggatttccgaacattcccaagctagaatttcaaattaacgccctgaacagttcagcgcctctatgtggaccgctgaggaggctgcgcagatccaccaaattgctcggtctgttcgacccgatatcaagctgcatgccattcccgagggcttgcaggtcgagcgtggccctgatgccattgttgaatatctgcttgagaaggtgccggtgctgctggacagctaaacattgtaaatatatatgaccatgatatatccgtgtctcaataaacgttcgatgactagtatttattacgttgctctcagttaagtccacggtatggaaactttgccttccttgtgatatctccgcaggcaccatagtatgttcttccgagccgcaaagtaaccgcattaaacgcattttatgctgatgaaacagagaggacagaaagccatacaaggcttaaccttcgttttgtagattattggaactttcgatagcctggcaaatccgacttcagaaatgagtcagtcgacgagaaaataagggtcccatgactacactaactctgagtgactttaactacatgcgaaccaccgacaagcaacctctcggtgtttaaatatttcgggaaattgaaccagcaagaatatgcacagcctgatacagcattctatagtggcatctcgtacggcgcccttgaccacccttggcaatgccacacaccgagatatatctgtgcaatgatccagagctgagtggttcctgcccatcgattggctccagtctaccaaaaattcggaaaccagaagcaaccgtctctcgctgagatttgtggatccatcgagcgaaactggacgagtaatccacggaccacagcccccaagccctcaatacggcacctgctcaatacgacaattctgctcaaaaatggtccctcaatgacttcctatccaatagttattcggtgaacacgagctccatcccgctccaaccccttggcaccttggcattcagggtcagccaggtataactcccgggttatcacttcactaggcacaaaacgaatcattttcacggtcaaagcccgtgcttataagctcatgctcgaccggggcattttctagttctctgttttcttctttttgatgaaaatctagaatgatgagctgacagacgattctatctcaatattctataagctgattcacgagttcgagagcaatgttacttcgtcgccattttctcacaatcctggccttactagccgtcccaacgcgggtattatcacgaaagggcggtgatggctctagcagcgatggcgatagtggtagctccagcggctccagcggctccagtgatagcgatgacacctcttcgtcaacaccatcctcaggcggactcaactgctttgatacccaccgccttgactttgacgatcttcaaccttcgcactacgaccgatacaatcgggaaccacgccgtggtcatgctagcgcttacagcgattgggatggcgtgttcttcaaaggctcagccagtttcaaatacacaatccaaacaccacctaacaatttgacagaaggcgacatcgttagttcatctttcatcacatgccccattggcacacaatccatgcgcatgctaggcgctgcatgggtcgctgccaaagctcccactcccgctggacctctcaatcccatcacgttggggttcaaggcctggaagagcaacgtgcgcgtctcagatatcgattattcatacagtgtctgcgaagacttggatctcatgcgcctcactacgacggtggactggtacaatgaaacttcagtcgagaaggccatggatgcagttgcgttaaacgtaacacaggcggctgataacaaaaacaagatcctgttcgacggggtctatgatcttaaggactgggcagatagtgaaaggagctccatggaaccagcacgctatgacaacgccggtctttcggatcagatgatttcccttccggatagtctatgctccgagtacagcaatttgggtaaaatcctcattggatggcccactgggacacacatcaatgggtctatgaccaatgaaactcttgagttgggtttttctggctcgacaattgctgggttttcacatcggtatccatggccggacaccgacacgaaagtaaatgtgactttcgaatttacatttgcgggtagttatgatgctgcgaattcatctcaggtggttctccccggggcgtcgagccacaatgcgtcactaatcacctttgagagggcgactggtagtgccactgccacaagtctctcattgtactccgtactactgtctttattggtcagtgttggggtgatatttgtgtgagcatacaactctgggaggaaatatatcaagttatcgccaatatcaattgatattttcccttctacttccttttcgttgtcatgaagaaactcaataacaagaaaattcatttttaagtaatcctccacctttgctagcatctcaatagcccggcatcactaggacacatacctaaatattaaaccgaataagtcgcaaatggcagtaattcgtcactccatacttagtaaccatttttgtctgggacgattccatagcaaggaccattcttgctaaacatggcccgcaagtcatggacaataaattcaggaacctcccaggcagcaaagtgacctccacgaggatgctcgttctgttgaacaaccggacctaggccagtggcccaagagtaagggatgacagaaatttcacgaggaagatgtgcaattgccagcttcactcgcgggacgtatgcaatcaagtccttgtaggatgttcccttgaccacctcggcgtgaaaagcttcatagtatatgcggacactagcggcgggtccggccgtagaaaaccaatagatagatatccatgttagaatctcgtcgtcggtccaggcatatgagtctgtccagtcgtgcagcttctcgtaaatccaggctaacaaggcaacagggctgtctgctagtgctgtgccaatggtctgtggcttggtgctttggagttggttgtaaccgaagccttctcgattaaaccactcagtcctttcgcgacctgccttttctcggccattgtacggcagcaatgcgtgttgcagggctgtccatgggttattgatgaatttagggggcttagccagcaccatgtttatatgagaggctcggcagtgctcggggtatagtagaccgatggttctagtaatccagaatccccaatctcctccctgggtcactgtgcatagtggagttagttcagggctacattttagttcttttcgagccataccatactgatcatagcccagcttgatcatgagcttgtgtaagacttcggcatattgtgcaaggccaaagccacgttgagtcactcctgaagagaagccgaaattaggcagcgatggagccacaacgtggaatgcaggactgtggtcgtcgcctttcagcatcggtagtagtttcgtgacttcaatgaacgatcccggccctatttagaaattagacaccgcacgctataggaaatttatggattcgattaatgagaataccgatactcacatccatggctaaagagcagtggaatcgcgttctttttggtgttgatctggtggacatctacatgttgaaccgcgtgaatctcggacactgaggaatccgtattgcgtaaaactcacagtggatatccaaactgccaaacccatctacctcgatcgacgttcgatattggggcagttcattcaacttggcttctgccttccgccagtcaaagccatccttccaatactctatgagtcgctgcacttctttcacgggagttccaaaatcccaaggatcttgttcagcggactccagctgagttgcgaatttggtaagtgataggcgttgctggaggtcttggagattctcatcaggaatgaaaatattgtacagtctcggttgttcggccataacggattagtttggtttaattagatgataactagaagctatctggtgaggcagtgttgcgggggagactttgcgcttgagatgaagtcagtctctccgaggcccgggggcttcaccgccgggtatcccagaggccacaacgcctaacctagcggagtacggagtaccgggacaatgtttactcactagtgctctgttgctgttcgatattatgctacgtcacggtcttgaacccttaaatcaaatcatctaccatttattgaccacattaccctaataaactgacctatgaacaaccttagaaatcgtaagaaattttgcaataaataaatgtcctgagttaggagggtggacggccttggggggttggggggatgggggggnnnnnnnnnnnnnnnnnnnnnnnnnnnnnnnnnnnnnnnnnnnnnnnnnnnnnnnnnnnnnnnnnnnnnnnnnnnnnnnnnnnnnnnnnnnnnnnnnnnnnnnnnnnnnnnnnnnnnnnnnnnnnnnnnnnnnnnnnnnnnnnnnnnnnnnnnnnnnnnnnnnnnnnnnnnnnnnnnnnnnnnnnnnnnnnnnnnnnnnnnnnnnnnnnnnnnnnnnnnnnnnnnnnnnnnnnnnnnnnnnnnnnnnnnnnnnnnnnnnnnnnnnnnnnnnnnnnnnnnnnnnnnnnnnnnnnnnnnnnnnnnnnnnnnnnnnnnnnnnnnnnnnccggggccttccaacgttggggcccccgaggccatgaaagtagattagtcagcaagaagctggcccgcaggcccgggcggtatttccaaggtttccaatcattgatcgcttgatacttgccattctctcaacctgaaatcggaacatgttctctctccggactgttgcacgcggtgctccaggtatccgggctttctccacagcccggatactgcagaccaagctggcatatcaggtctttggtccggaaaaaggcgaagctgtccgggaccctatcctgtttctacacggtttatttgggtcaaaacagaacaaccggagtattagcaagtatgtttcgggaccagatatataatcaaacttccttttcttacatatcttttaggattttggcacgggatctgaaatgccagatcttcgcactggtgagtttccgctcgtccccggaaagacatgaacaaaacgtcattttagaatcctaaacaaatctgtacaggatctacgtaaccatggccattctttccatgcccacgagcagaattacggcgtcatggcggaggatgtacaggaattcatcaaacagcacaaactggacaaatgtgtcctgatcgggcattccatgtatgtgatcatactccatgtcagccgtagctcaagtgctcttcacatactaacaattggcaaaggggtgccaaagtggcaatggcggtagcattgcgcgcccccgaatacgtgtcagctttaatccccgttgacaacgcaccggtgaatgcagcactgcagagcgatttccacaaatatatccgcggcatgcagaaaatcgaagatgagaaggtgtcaacgcaatccgatgctaacaaaattctcgagcattatgagaaggtaaggggtggtcatcttttcaactagaggagaaggcgtggcaatgagcctggtacccttcggtaatttttagcatgctaacactacccagtctcttccaattcgccaattccttctcaccaacttgatacgctctgaagataacacactgaagtcccgagtgccgctatccatcatcggcggtgcattaaataatatggctgattttcctttcaaggaatccgataacctccattattatggcccgacgctctttgttcgtggcactaggtctaagtatgtttcggacgacaccgtgccggctatcaaaaagtttttccccaacgcgcagattgtggacgtcgaagcgggtcactggctcatttctgagaaaccggaagaatttcgccaaggtaattccctattgtcaataattaataatagtttatggcttacacgatgataatagcggtcgtgaagtttttgaagtcgatataattgggacggcattattggggtgggatatcggtcacgtgacttagaatttagacgcatatgtactagagaactccattgtacagtaataattcactcattggtgtgctgagtaatatcgatttgaatagaagatcgcccggctttgagcctatcgaccgtgtggcgaagacgtatctaataatgcttcctcttaaagctggattgcatagatatcgatggttcacgtgggaagtcgtaattcgagagtgacggagggggaagaacgagcccacggcgatagttgtgagaacataatatctaggagatcaggtttggacctgctcattcatcctgcttattccgctttcgcttcttgcctggtctgcttgaagaataaaacagatcttctgcctgctccgccctcttctttgccctcttcttgtcttttctgttggagcccgaagcaaaatatgacggaccagaagagctaggagccggcgaatagtcaattaccgaagagcattcggttgtgtttctttcgtcatcggagtctattacagaggagacccgtcgcttccctttcaaatgttgaacctgacggggttcggcggatttgccaggatacggcgacggatgaccggagctgggtccactgggcgtttgtgagcgctgtcgagcctgcatcgcagtgtgatttgacttcgaaccgcttggtgggcaattttcggccggacccttcccgttgacctgcactggctgatatgaacctagagcagggcccatggggactgtcttgggggttgtggtaagtcttggaataaaagcacggccgtttggttgtgattgaggagtttcctgtccatcgatgcgctcctccattggtctatcaagaatatcggaaatctttgctccccctgcaagcgccttgaaagtatcttcagctttcctcagacgtttgatgtacatcttcacctcatccccctgctcagtgaatttctccaaagataccggaggctcccgctcttcaagggctttcaccttttcccggagtttgccgaaatcgttctcttcggttgcgttatgaccttccaactctttgagctttgtcctgagtaccccaagatccgctttctccgctgtgcttcgggcttccaagtctttcatctgtttccgaagttcgttgagaacttcatcttcggttttgttccgaccttccaggctttctagcctcatcgagatattgccaagaccatttttcgtggtagcgtctctctcctcggcggcttttcttaactcggcgatcgctttttggacggattcgagtgccgagaaatgagcatcaatcttaccgatgaatggatcgatctttcttatggactgattgatgttgtcaaattgtgcagactgctcagaggccgtttgatccatgcctccgatggtgtcgtcttgggcggagatcctgttggataaatcactccattgatgaagatttctctgaaactcatcactgtgctccttgattgctttctcaatcggtgcaatcttgtcggaaaggcctttaacctcttggagcaaagtcggcaaccgagtcaaggtctggagctgctcggatgacacatgtgctgcttgagaccttgctgcgcaggcctgggcatttcctgtatctgccttgaatcgattcgtatctgccttgaacgtctctgtatctctctggagcgcagaaattctgccgtcaatttcagtctggtaggccgtcaattgatgactgagtttatcaacagaggggtacatttgctgcatggcatgtgccatagaattgactaagtcaccagtagtaatgttggaccaccgtgtttctaatgaccgaatgcccctagagagagattcaattttactttcgcactttgttacagcccgaggaaggtcggagactggagtaaggcgggtttcaaatgcatctagtccgtttttgaggtcgttttggaggcgctgcaagctctcaggcaaactcgtcctaagttggtgaaggcccacggcgaatattttttgattggtgttcatttccttggagtttgcggtcaggtcctgcacctttctcaaaatttcatgctgtttggtttccagtgatttctggctcgactcttggtttctgcgtaaagcgctcaactcatccagacgggcgacatccacctcatgatggaggtccttaatcttgttgagaaaagttgtgtactcctgtactcttctttccagggacaccattcttgtaagcaccccgctgtggggagttggtgttgcttctgacgagggcccaccgccgttatcgatgttctgttgctgggttctgagtgaggccaggtgatcttcttgagcggttatttgcgccgtggtctcctgcctttgggtttccaggtcagtttcaatttgtgagatttgagtcgacgcgctattgttgagatcatgtcgtttattattgagcgacctgagattgctttcaatgtcacgaagcttgccctcagcgtgttcattcgcagtttttaatttgccgccaagatccgagatattggtctccagcttctggttggaatttctcaattcttcctcgacggtgtcaaccatcttctcgacggtggagatcttgtcatcaaacttcttgtcggcagccttcacttcatcctcaagttctgagattttattcgtgaattgaccattgcgtttcatttgatgggagactgagttcgcaatcctattcatgtatcccattacctcgtccaatccattcgggttctctagggaatgctgcactttgtccaggtttcttttgagttcatcgatatcttggccctggcttcgcatgtgcgtctggactctgtcgaattcggcatttcctttcattggattatcgccgctgctggttgggcctaggccttccctcatttccttgattgtggactccagattcccgaccctttcaggtatcttttcaagctgggattgaggcttgtactgcgacaacgtcgaattgaaattatcctgcgcctgattggagagtaatcgatgctgcatgatcgatttgacgtggatgtccaattcatttttggccgcgtccagctgctgctggaagagagcgatgacgctcggaaattgttgagattgttttgccctctgtaggtttttggtgatagaaactatctcattttggagtttctctttctcttcctcgcacttgttcactttgatcaatgagttgaccaaatcagagatgaacaatgcaccttgacgaatgggcgcacttgggctttctattgacgtaggtcccgcggcgctgttaggaatcgagagtggagacacctgtgggagcgatttcgcaggggatttctggatgagggcgggtgttgcggggaggtttaggtgtgcctgttgagcagttgacgattgggaatcaactgattgcctaacagcaccggcaagccgaggatcttgcgccttggtcggggatgacccaagcagaagtaggcccgagagtcgcttgcggggattgaggttcggagagtcaacatccattctgctggccatattccctgcaatgaatgtattgcaaaatactcatcgtattcgcaggagaactaaagtatagtgtttcggcggtcgacttgtgagacgaagtctacacggcagtcctaaaatggaacgcttaaggtgcaatattaacgcgtccactgtatgaagacttggatgtgaggtattgttaaaaacgcccagtatattcctcctgaggtagtcaagggaactagatatgtctcatagaacgtgttataagcaccaaatttgtagaattcaagccatgccaataaaacaaagcagaaatgaggtcaagcgggttcaccattcctttcaggaattattctgccgggcggtgacaatataattcggtctgcgatctgccctctcttcttttgctttgctagagctttggcgcatttaccaacataatcttccagtttagaataaatttcactctggaaatcttcaaatatggctgtggtgagttacaattcttctgtaataacctcacggttgctgacaccaaaacagccaatctcgactgtcgcagagagcaaggagctccggggactgaacctcatcgccgcccattcgcatatcagaggccttggtgtcgatgcagacactcttcaacctcgggcatcatcccaaggccttgtgggtcaggaaaaggcccggaaggctgctgcggtgattctgcagatggtgagggaaggcaagattgccggtcgcgctgttctgatcgcaggacctcctagcaccggaaagacagcaattgcaatgggcatggcacaatctctcgggccggacgtacctttcaccatgcttgctgcttctgaaatcttctcaatggagatgtcgaagacagaagccctgacccaggcattccggaggtccatcggtgtgcgcattaaggaagagagcgaaatcattgaaggtgaagttgtggagattcaaattgaccggagtgttactggcgtgagtggattctctatgcaaacgagttcataacattggatactgactacctacagggcaataaacaaggaaagctcacgatcaagactacggacatggaaacgatttacgacatgggaaccaagatgattgattctatgacaaaggaacgagtaatggcaggagatgtaatctcgatcgacaagtcctcaggcaagatcaccaagctcggtcgctcatacgcacgctctcgagactacgacgccatgggcgccgataccaagtttgtccaatgccccgaaggcgaactccaggttcgcaaggagatcgtccacaccgtcagcctccacgagatcgacgtcattaactcgcgttcacaaggcttcctggctctcttctccggcgatacgggcgagattcggagtgaagttcgggaccagatcaataccaaggtggctgaatggaaggaagagggtaaggcagagattattcctggtgttctgttcattgacgaggttcacatgcttgatatcgagtgttactcctacatcaatcgtgcccttgaggctgagttggcccctatcgtcatcatggctagcaatcgcggccaggcacgcatccgcggaaccacctatacctctcctcacggtctaccccttgacttcctcgatcgggttgttatcgtcagcacacatatgtactctggtgacgagatccgtcaaatcctcgccatccgagcgcaggaagaagagattgatctttcgcctgatgctctcgcccttctcaccaagattggtcaggagtcaaatctgcgttatgccagcaacattattactacttcgcatctcttgagtcaaaaacgcaaggcgaaggaggtcagtgttgatgacgtccaacgcagcttccggttgttctacgaccctgctcggagtgtgaagttcgtcaatcaatatgagcagcgcttcatcggtgaccaaggtaccgttagcttcactgctgctaccaatggcgacgccatggagctttcttaattgggttacgtgttttagtactgggctattcggtgggcagttaagcgggtcgaaaaaactacactggatcttgatttttatttcgttgtcgcatcaaacgatgtatgataggactggcgcttgctgtgtttatttggcctttgagattcaattgcagtcctctgttctgggggatctgatattaatatttcattcataaatggtattttgtgtatccaaggcaatgtcgtagctgatatggggggattatattacaagaaactgacagtgccgctccactgccctacatctccaacttgacggaactcaacaccttcgccaaagtagcccgcattcttccatgagtccatcatcgcgctatcgtacggcccatgggcatcccctccatctcgagcatcagaccatcgatattcccacatggccggaccttgctcagtcattccttccgcaggagggtcgatccagtcctcacccgtgtcgttgcggtactgccgtgtgagcatttcgcgctctgtgtcatagatatctatttgaccgcggcccattaagatatcggcggcgccagtgatagaatcaattgctttcttccgagccagctcattggggttctcatccgtcatctcgacatcctcgacggcgttcttcttcttattctttttgttttgccacttgggctttcggtgaagccctttgcccagtcgggccagtgcctcgagtgtcgtttcgccgcgttcgaggtgagtgatgatcgtcttcagggcatccgctgtcaaaacgctgtcgtccattctgtctttctctttgcgctctgcatcgcgttgctcggcagcttctttggctttcttgatgtccttcttagaaacaccctccagccacgagtcgtaggccgcatcggggtctactgctttgcggacgtagttgccttggtcgtcaaatcggccctcctcttgttctgttcgcatgttgaaggcatctaggagaggtgcgtgttttttcttcccacccgcaccaagttcctcgtccaccacttcgtcaattcgtgcgcgttcctcttccccgacttcactatcactcccatcttcctcctcatcaatttcggctgcacccttgctcagatcgacatgaagtgctcctccaccttttgaagaagcgacttggccctcgatctcgtcgtctcgtaggaaacgaacggattttttcttgtttatgatctcgtcgccgtcgacttcctcttcgccgaagtcctcttgtagctcggcgaacatatcatcatcttccgcatcttccttggcttgtttgcgtatgggtttctcttctctgcgcgcagaaaacccctcgttctcgctgtcggaatcataaccctcgagattgaccgccttgcgtcttattctttggccacgtctgccaatctcatcagcgtccagtactgcgtcttcttcgggcgcatcagctgcaagagctgagggattgcgaaggtcgaagcggggcttcttgtgctctgaggaatcctcgccgtcgtcattgtagtgggtattggcgaaatcttcgcctgcgcgcttggggcgtggcaatgaactggacatggcgcttttggggcgatttcggttgaaaacaaacgagaaagatagcaaattggaagggtaaatcacctctaagagagctgatttccttgtccggggtcggaccggaaaatcatggcggagcgagctgcgtcaccgatggcgatccaaagagcggcatattgtacctcaaatcaacccgtctcacacttttctctttgtccatcttcagtctttaaaaccacattaatttgacatggtgagtcaactcagactcccccgatcttcaccttactaactaacagctttagtaccgacctggttactggtcggatgaccccatggatggaatcctaggtgccggtatggcgcgcccgggcgccacgtcccgtcgcttcgatgaatactatcgctgctacccagtggcgatgcttcctggtcctgaaagagagaatgtgaaccacggtggcaaggtcatcatgcctcccagcgcattggacaagcttacccgacttcacattacttatccgatgttattcgagcttcataatggtgcgaaagagaggatgacgcatgcaggtgtccttgagtttattgctgaagagggaaaaatatatttgccattctgggtgagtaagacagactcgtcaacgtgttgtaactgtactaagactcggttcgctacagctgatgcaaacattactactggaacctggcgatcttcttcaaatcaaatcgacagacctccctcctggccagttcatcaaactccaagcacagtcgacctccttcctcgatattagtgacccgaaagctgtgctagaaaacgcctttcggaatttctcatgcctttccaaaggcgacgtcttcactttttcatacaatgatcaagtatatgagatggcagtgctggagacaaaaccttctgggactaagaatgctgtgtccgttctagagaccgacttggaggttgatttcgccgctccggttggattcgaagaaccacagcgaactagcgggaccagcacacccggtagcgtcattagcggtgggaagcttccagctggtggacttttacacccccatggcaccatggcacaatcaatcaactactccgccattgcccccgaggccacctctgctgccacaggtgcccgtgcggcatcatccaactttttgtctggaggacagcgcctgaacgctaaaaagggcagcaaggctccgacccctaacccttctactcctactccaggtgcttcaagttcctcacatccgcttccaacccgaagaatcaacggcccgcaaccacttcgactcccgcccaatcaactcttcttcgggtatgcaatcaaacccgtcaaaccccgtgatgagaatggtttggttgtcccagatgaccagcctaagttccaaggaattggaaaaactttgcgtgggaagcgaaaggatctgtccgactctgccaccccctcggggagtgaaactgagggccaaaagagcaaggaaaacactaaaaagtccgacggtgggggtcgaactttgggaaagcactaatgtctgcaacaacctatttaaacctacactttcacgattcccctgggcttttagatagtggaagtctctagattccgcagcgagatttccttcaagggcatagcaaggttcaacatggcgttgggggagtttttttaccttcacttgaatacacaaaaggccttgcaataaaccccactattttcatatttctcgtaggcagtccccttctccgctttctggtctttgttttacaatcagtggtattcatatgtagcggatatcgaggactcttacaacactcaagggttgggatgcttcggaacgatcaagcatgcctcctatatatctctgcatgtgaattgaactgcaggtaagttatggtcctggtcagaaacggcacgtttagttcggctagcgcgcatagctcttggcaagccgaggatcgccgtgcacaggcctgaaactggaccacactattgatctcacaccagatattgggggttgcatcatggccacaatacctgaaaccaatttgggggcattcatcagactagccccgtcagtctatctccaagacccgcccaacccgagcgagaaggcggataggccagtgatattcattgctttttggatgaatgcacccccgcgcgctttagcaaagtatgtggtcgagtacagagggctagtaccatcagcgcgaattatcttcgtcagaagctcatcaagtgacttcatctggcgtctaagggcccagacccggagagcccgcgtcaccccagccgtggaagcaatgcgcggtctagtgacacctgagaatccagtatttgtgcacttgttctcaaatgggggcatgtcgagcacaacacacctattgcaagcctggaagaatgcgacagggaccccattgcccatatcggcaatgatccttgatagcgcaccgggcagtccgagcctacgagcaggactcaaggctttctcctttgcgcttccgcagatgtggatcttgcgactgcttggcaaaggctttatttttgctttcttggttctcttcaagttgatccattcgttttctatgtttccggatcctatatcccttgcccgggagctcatcaatgatacctctttggtacgagcggctaactcggacggaactctcagtcgttgctatatatactcagatacggatgatttagtggactggcgcgatgtggaatcccatgcggtaaatgccgaggctgagggttgggtggtgcgccgtgaagtgttcaagaactcccctcatgttggacatatgagaactgagcctgatcggtattggggcattgttcgagagtacttgggagctttggtgtcggtgtgatgagcattcctttgcctttcggttttgctttggcttaaggaagactggaacgttacatgatagacacggtactgtgcgacaaatatacacatctgcttgcctccatgcataactgttttttttttctccttcaccaagtcttctgccaatgaatatatatccagggatttccttccaaacctttgaatgtcaattgacttctgatttaaccatgcagcaaagtttcgcaattccatggtcattggggttaaatcactatgactgatatctaaacatcatccaggcagatttgttagagccaacgtgctgaaaggcccggagccaatttccgcaacttccgtctcaaggacaccaaccattgcaatataccccagaatcaaagacgacgacagccatgcatcattatttcggccctcgttccactgctcccggcttgatctgttcaagtattttcccatctcaatcatcttatttcacttatcttggtgcttgtctgatattgtgcaggccatttcacaatagacctcgttaaactgggttttggtttccttcgttggccctgtcttactctgaccgagcaaaataggtcatctcattatcatatcaatcttggagacttttatttggtatattattattgactaaacgccacgatgttccaacaccaatcccaccagccgagctacctcaacaccatggcggagaaagacacccgtttcgctcttccgggattcaacaggccgctagactttgctccgacggagaaaaacatctatggtatcgagagtcggagtatgtttccatctgcgctggatgatagagatatccaagcaggatacgtggagtaagtgtagaatccccaagacccgagaggggctcaatgctgaaacccatcatcatagcctacccgtcttgaccctccgcgagatgcatatggtagagttcatggagcaactgaccgatattcatgagtggtggaaaaaggttagtcgttctcaatacaaccgatactgatgatttcgctgaaatggttttagatctttgatcccgccacacaagaggagtggaagaaggcggccttaaacagtggcaaagaccttacgctcaacatggttgaatggattattgacgagcttcaattcaaagccatgatctacgagaccacagatgtagtcgccctttacaacggcgatgtcaccaagtccgacacaaatctgcctgattcactctatagtgaaatgcaatcccagttcgaggtcctagagtacgatttggaagaaatgaagtactaccatccaggacatctaagccaacagcgtgacctcatttccatggcattgtatccgctcatttacggcagctcccgtattcttaccgacagggttattggggtcgaggactgcctcaagtttgccggcaagggtgaagtgatcccaattccaaaagataccggaataactagagaagacattgcctggcgcgtcttggcccgggcagacatcaaggttcggccctacagccggaaataccagcttctcccttcagactggtcactcggtgatgatggacaatggcacatagccacatacatcaacaatctgcatccaataaaacaccggggcctctacaatctcttcgagcggattttcaattgtctcgttccgcagtggaacgcaactttgactcccctcaaggacatgctccattcccgtgcccgaatggagtaccacaaggcggaatattacccagtcccagcggaaatagctgcccaggcacctacgattcaaccaaaagaggcgcagagtgagtttgacgagcgcatggagaagtggagaatgcagaactgccgtgccatccaacccgacgcaggcaagttcattccctgggcagtaccaccctggttgatggacaaattgcccgaggacctgcccagtcccgttcggattgaacgcggtgtcgatatcaaccgggactacaaggaccatggactgcaggtgatcacacgtgtgttgggcattgatctaactccggagaatccgactttcaagacagactggcacgtcgagggctcgatggtgagttcaaaagcttcgataaccaaacagtgcttgataataacacaacgataaaccagaacgagcacatctgcgccgcagcattcgtaccatacgagcacgacaacataaaggacccgtccatgcaattccgcaacatggcagagtccgacacgctcacagaaatcgagcacgagccaaacgactttatctggctgaaacaagtctacggtttggaaaacggcgagccggccatccaatacccaggctcgatctgcgccaacgtaggtcgagtggtcatgtacccgagcaatgtagaacacagattcacgaacttcgaattgaaggacaagactaagcccgggcggacgcgcgccgtggtgtttttccttgtcgatcctaatatgcgtatcatctccacggccaatatcccgccgcagcgtgtggattggactaaggaatttccggctggggcagatgtcaaggaaggtttgaaagatctggcgcttgataatagaaaaaacaagggagatatgcctatgaatctggacgaggctttggaaacgagagtcaacgtgttggacgagctcgagcagtttactcgctatcagcatgtggcttttgagtcaaatgttctgatgctctaatgttttattttcttcttttcctctggtttttttttctttttataataaaatttgattttttcgagggccactgccgagttgtttctgtcgctcgaaggtgatgtggtagctgcagctacgtgctactcaaaagaataattaggtaaagatgatattaaatcgccgcgctatgccattcattcgtaagaccaagtatgcacatgtcccattttgattatcccaaactccaatcaacccaaagctatatccagagctcaacgtcccttcatctcagggaactcatcatcaagcttcaggcgagccgtaacgttcatactcataagttcttgaatgagaagtttggcagcatatgggatgaccatcttcacaacggaacgagacgacttgcacccaggacaccagttcaagtagcccatgaaaccacacttttcacagacatccacctcgtggcgatcggacgagatcatgaggcgctccagcagcagctgactagtaccgtacgcaatcaaacaatcacgttccatctcaccgagacgcaaacctccattacgcgaacgaccctcggtaggctggcgagtgagagtagcagtggggcccttggcacgtgcgtgcatcttgtcttgaaccatgtgcttcagtttctggtaatagatgggaccggtgaagacgtagaaaggcagagcctcaccggtgataccggaagtgaggtagtccttgccaccatagctaaagcctttgtcgatcagaatttgggacatttcttcgacgggactgccgccgaaacaggtaccgtagccgtgttggccggacaaaacacctgctttaccggcgacaagctccagcatctttccgactgtcattcgagaggggaaaccgtgagggttcatgataatgtcagggttgatgccttggtccgaaaatggcatgtccgcctggtctgcaataattccaacaacacccttctgtccgtggcgggaagagaacttgtcgccgacctcagggcgacgggtttgtcgggtcaggaccttgatgagttgcgtctcgccttcagtggcagataacatgaccttgtctatgtaggaaggatctggcagcttgtagttcatgggtgcctcgataacatctccgccgccaatgtcggagccggggaatcccaacgaattttgtaccctaggcgtgaccttatttatatagctttcgccgttattgaccatttcgccaactgcagccagaccatcagactcgagaagcgcgtgcttgcggattggaacaccattctcgtatgtcggtcctttgagggaatccttggctccgttggggtaactcttcagcgtcgtgacgtacttgcggaagacctggcaacgtccaaagccacggtccactgatcccttgttcaagaccagagcatcctcaatatcgtagccagaataactcatcacggcaacagtcgcattctgccccgcaggtagttggtcgtattttgtcagctcaatggttcgtgatttaaccatgggcttttgtgggtagaccatgaggtaaagaatggaatcaattcgctggaattgattggaagcaatagcgccaatggcttgcttacccatggcacattggtaggtattacgtggggactggttgtggtgaggataagggatcaagccggcaacagctccaaggactgtgaagggttcaatctcaagatgggtgtgagtatttgagatgtccttctcgtagatggcgatgtaggagtcgttctcctcgttcacgtcgaggtattcaacgagcccttgcgcgaggaagtcgtcgaactccatttctccatctcgcagcttctcgagatgctgaacactgacaagagatttgccattctccacaacaatgagaggtctgcaaatacgtccatcatcagtggcgacatggacggctcgctgatggtgattgatgtaaatgctgacaaattccgaaacccggcccatgcggcgcagtcttcggaaagcattgaggaaggacttggggcgtctggtcagaccagtcggtgtaccgttgatagaaattgtgtaagcaccccgagcatagagctgctgtccaccaacactcgatatgtcttcgacgccgagcatgaatatcaagtttcgcaccggtccttcttcatcgttggttgtgatatgcgtcatgagggccaagttcttgaccaaaccacatgcctcaccttcgggggtatctgcagggcacaacattccgaactgggacggttgcaaggcacgaggaccactgaccttacgggtcttttcgaactgactgctaatacgggtcatcataccgagagctgcaatgtaactcaatcggctgagaacgtgagtgacaccggcacgctccatgcggaaacgcttcaagctccagtttcctgtggagatggctcggttcataccctgagtaatatgatttccatgcatagtcacgatagtccaggcatcgaactgctcggcccgattgcgtttgttcaggactttgtcgatgttcatcttgatatcgaaacaaaatttcttgaacaaatcttcaaaaagaagggccaacatctgacccgccagctccagtcgtttgtttccaagataatcacggtcatccactagggctgggtcactctttgccatcagaacgcgacgagccatgtgagcaacgtagatagccttgggtcggaagttcatgtctttgacctcaatatgagaaataataacagatgcaatggcctcaactgcctcttgaacgtgagtcttgcgataagcggcttgtttgcggttgatcttgatgcgacatccgatccactcgagggcttgttgctgagtgtaaacatcgacgttgattgcctcttcgaaatttatagcaaaatcatcttgatacagactatcgtcaccagtaaccatttgcatcatttccttgtcggtgtggatgcccatggccttgagcaaaatgacgattgggatgtcttcattgagtacgttgtgcttgacgtagagtctgccttttttcgagacgatgtaactcttagacttacgctcgtttgaggaactgtggatgttagggatagcaaattaagaaaggtccaacatgggacatacctggtaaccgaggcctggacgatatctttttttgggtcggtttccacaataattctgtttttactcaattgttcttgtacaagaatgaccttttctgttccgttcacgacgaagtaaccaccggggtcaagaggacattcattgaggacgcttatttgagcaggcgttttattcgacagcacacatttagaactgcggagcatgatcggaattcttccgatggggactgctcgtcggataaccctttgccggccacggacatactcaaagtcaacgagaatgggtgcagcgtatgtagtgtctcgtagcctacactcttgcggcgtgatcgtggactcgaaatcaattccaccatcgccttgctcgtcggctcgtcgaggggaggcaacgtagatatcagtaaacttgatgtagaagttgtggtccacatcacttcgaatcgtggagcttgactcgacaattttcttcatttgcacctccacgaagtagttgtaggagtcaaggtgctgcttcaccagccctttgaccttgaggaatgccggtagcaggttccatttgtccctggccgtatcgatagggtctgtgagccctttattgtagtaaaacggttccaaaagtgcatcgaatggatctctagccttgaaatccgaagctggttcaacctttccgggcacgggatgttggtgaggctcaggaacagggttggacacggacggacgcttgcttttcgtagagtcagtcgccgagtggcttccggcctggtcaagtagcaggggagtcagtatagccatcagaagttgcgacggaaaaaaagttttgttacctctgaaggacgtcgcggtcgactggccgcagagggctgtggcctcttgcgcgggggcattttggctagacagctgaggtttagagaaagcgatcaagaaatatatcccaatcaaaccactcagttgtccaaaaagaagctcgcaagatggattctcatggaggggaaagatttgagtaatttggagatggcttaataagccgcgggctggagctgatagttgcctgaggcattgacgataagaggatcatttatgtcttttcggggtttcatatattggctagctagaaggatacgtacatgatagctatagaagtgtcatatgagtgggaataataacatgaagtaggcttgccgggcttatcactcggcgacgggacaacataccttaaccttatagatgactttttgatgtgtaaccagggatagccattgaagattccggacatgcctgttaatttgactggaatgagatttgaagctctcttgttcccatttgatgactatttgggaaggatgtagctgcaatagtggaaacttttgtatagtaacgaggcagaaattcgtgatctctaatatatatcttgagacgaccttggtacggagtagatcattccagaatgaaaactgaaaatggggattgggcaaacgaaaagggcattcccgagtactttatccgttattgaaaacttaatctatctgaatctgtagttagatccatcttatcaagtaacggtacaaaatcgaaggcccggagcataccagcgttaactccgaggcagtcttggagaagcggatcttgggctatccactaaacgtgaaccgatttgaagaatgattcatgttagtatcaactactcaaatgtatagagctgtccagggctagatttacgagagccaggttgtcaaaggtttgtccattgacatggtatgtagtacatgtgggtcttttgcgcatgcaggccaccccccggacatttacgcctgcacggacacggacaaatgatcagaattgactcggttctgctcgagagagacgatctacagcagtgcatggtatagataacaacaccagatagtaaataagcggtcacgtagaagacaacgtggaaaaaaggcttccaccgcatataccaagcgctaggcattccgttcacaggatacggagtactgagattattattagtgcccatagttgcactgcttttgtggcatatgatttatcaagtactgggaacattcggtccttcatgtgcgatgtattattattttttgatgcctgtggcgaaatcagtttgaccgcaacttcgaaattgccacccttcgcttcacgggcacaagattgtacgcaatcttgccttttccggagggaattcccatatttctaatccagtgcacgaagctacagcgcaatgagtggtccaatgtatctgtcatagtacttgaagatggtattgatcgctgtagcaaaaggaaggtataaatatgtatatgcaacgccatccacacgtggttggtcagacaggggtcatcgccatccgatatgttctatgtactccgtactccatacagtatcctccgaggagataatcccgacgaaagcattagcaatgttatcgaccggggtatatccgttatcgacagcctagaaggcctattgtagggctttttcctgcaggggttggttggacagagggggcggagaccattttctggctagggagtttcagatattatttgcacaggtacttttggaagcagaatcatagtgacttctaccaagactattttacgaatgatttcgaattgtgattcgtgatatcaaaaccgaggcagccagtcaatttagggggggtgactcaggcgtcgggcatgaaagaaagtaattaaaattggtgcaattttgggcgtcaataagtgggtttcgaggctcaagcctgcgattagtgggtattacgagtgcaatcatggtgactattggatgctaggagaccaggaccatatctataagtaagtactccgtactccgtacggagtagttcgcgcacagttggggagttcggtgtaccgaggttttactccgtatcacttggacagcacagaccgtagcgagtactcagctcagatcgaaaaccataataatccatcgggattcttaacagatagtacatacatcgatagatagaggggaaaaagtggtccatgtttggcgatctctccgatgtgtgaataaataataaagatgactggggtttggagcatccccgctccatcggtatgcttgttatttggtggatcaggggcttcaagcgacgcgggatcagcgctgggtggcacttacaccgcttgtcctgacgtttagggaagcctgtgaagagtgtgatatgggggaagtttaaaaacagatttcgatgtgttcgagaaattccagaagtataaaagaaccttggattggctgaaaaggaaaaggaaaaaaggagccattggcacagacccgtggaacgagaacaaagaaaaaagaattaacccatggacgaggagctaaccgtttttccatggagcccctattttttctttcttccattctgatattggcatatactaccccaacataactataccggtaatccctatctcttccaatacttcatacaacctacccaggattcaggtacggatcaggtacggagtataggcgcctaatcattctagatggcgatctgttatcacatcttcgggcacttgggtcccatcagttctccacaagtattcaagaggggccaaatgcacctgcagctgccacgctctaccagcgcattccaccttcccctcctcacggtatcctagcacagtggttctcccgtgtatagcccaggctgtccccggtccaccatgaaattgaccattcgtagcctcttcaggcctcgcgggggctatagcccattgactaccccaggctcttcccgggacaaaagcgcccaggtcgtacagacaacagaggctctccaatcaatggaacccgatcaattcccgagtaagtgctggccgatcatctgctgtggtcaagttgtggtcggcaacatactatagttgaagtatacacaacgtgtatggatttgcaacgaacccatattatataacctcgagaatacactacgtaaataatgcaagatcaaaagattcaaaaggtcactgccaaacttctgactaaaacaaaaaagaaaaaaagaagcagaaacaaatcgaaagaaaagaaagaaaaaaaaaaaaagaaaactagagcacagtcatctcctaaaaggatatccccgctctgatctggactcccagccattttctccccctcttcctcttcttctcttttcctcccttaccaaatcccttttgtacaacagttttgtatctttcgtttgggtcattgttaggttgtatttcctcacgcgacacgctcgtttcgcccgcgcctcgatccctcggtgttcgctaaatcggagcggtaagaggagctttatcccaccctgcaactccctgctgatctccgcaccgtcaggtacacacgatattcccgctcgacattgcccatagatgacttgcgcagcttcaaatcgcatagcaattctcccatcaaccggatttgactcctctcgaggcgttcattgtgtgagttaggccctttttgcgagcgcagatcttctccgcctggtcaacccctcagcccctctctcgacttccccttgcttgagacgccgacgacacacacaccgccagcccacccttccctaccattcggatatttccccggcctccggagcacgtcgcgtcacaatatctggggctgggagtaattgcttccccggagaagctccctaaaaacaccgtttttcggcgtcaacaaattcctatatttgctgaccggtgcttgtatagttgaacaattcggcctgtccacgatggccttcaagcacgggctgagtgaacgcctcgacgagctgcgcttcccatccccacgatccccaccctcggaggctgcgttccctgggtacacttctctttccccgggtcattcaaactttggatcgggattctcgtctcgcccagctagtgatgttcgagcgaacctgcagcgtcggtttacgactgattcgagcaagttgtcgtcatggaattatttgaatccaagctcgggatctggctcgagctctggctctggttcgggccagatgcaagatcctgtggatttattgtcttcggtaagattgaaatttctttttgagttagccattatccctatgcattgaactttcgtatcgatctcgtttccattgaatggttggcgatgagtggggttatgtgaattggtgtgctggttgttcagcctctgtatgattctttgagatcaagttctgtcggcgtctggcatgtcacactaccttgcagcttgaagttgacgagaattcactgccattcatccccgcgattcatccctaccattcattccccgcgattcatctgctgctattcatcatccttatctcttatctctttcactcaattgcccattgtttcctattcatcagtttcctttatgcgtcaggcaaactcgccgaggtgattgatacgattgatgcgattgtcgcttattgatggttcaactccgtccattctgagcctattcatacttcaaatcgagtcttgctgctaggctgcgatccggtcaggattggtataagaactacagcttcacactttcccttttgcttcttcttttacttcacttcataactttcgcatctgttccatatcttcgactccgagaacgctcactgcctgtgctactttatttgccgttgatttcgcgtcacattcacattactttttctgattacgtcgtgcgttcggttggtattcctcttgcttgttctgtgtgtctacggagatatctttctatgccctttcaagtgtcttctacgttttttgtgcaattctgacaagttttgggcttccacttttctctcacttcgttcaaactgatatctttctcaaacttccttccctcttcctcgttcttttgcttgaatacatcattctggaaaccatatctgacttcttcaacagttcgagaaaaaaagacagcacattgagtacatgcgtgaacagaaacgccgtttcgaagaggatatgaaaatcctcgaccttcagcacgctcgcgagaaactggagatggaccagctcgctcgggacttggcacaggctggcatctctggtccagtcagtgagccaaccaccccgcctgagtaccgtgatactactgtgtcgagcgcctttagccgccctgctcgtttctccacctcgagcgtgacctcttcacccggatttttcaatgcttttgctgcttcaaccttgacttcccccccgcctacttcccaacctgctcagccgtcgattgaccgatttgccggacactctgtgcccggttcgcgccgaaactccgagaaggacgacttccttgccgatcctacttctcccttccgatcaggcccatcgtgagtggaaaccccatctttcgtgttgtggtatccagggcttagctaataattatttagcgctgttcaccgatactcgctgccctccggcaatccaaatggccagtctcatcgctccagcatctccggtttgaatggatcacgccttgacaccttcaacgttcccaaataccttttccccagtgaggaggacaagcctcaaagccatctgagggagctcgaacgcttgtcgactcctgacatcaagagttacatcaagttgaccgaacctgatgacaagttcccaaccctgtcccgtcgtggtgactcaaacatggtaagtttcttataattgaacacaaaacatcccgaatcctaatcatttacttagttgtcggcaaaccctgatgcccatgatctcgccaaccctcgttctccaggctcggagcattattccaaccacagtcggcaccggtcgtctcaccagagcatgccgcagaatattcacaactttgggcgcctggaacagctgggaagccaccataacgaggatcacggcagctttgtccaaaccccacgccacagtgcacgtcgttccatgggaagccagatgaccttccacgataaccgccatgatgagatagcaacccctgttgcctcgagccgtccaaatgctctgcagtcatcatactcaactaatgatctgcctactatcaagggaaatggagctggcaaagcagttactcccccgaagactcacattgagcacatgcatcaccacaataccagtatggggcgcattccccagagtggtgtgaacaaccaggtcaaagccgagttcgatgagaccgacttctatggtaatcaatcgaatttgcacgcgagcgcccctcccttcgggcctcagatcaatacggctccatctacccaccacgttcctagttcggttgctcaaatgggattgccattccaagtgcctgcggttcctgccttcaattatggaatgcagggctatgtcggccaagcaaccccgatcaacggtcatatgcaaaacttcggaggagcttccgcctacaacaatgcctaccccaactatggtcctgggttccgctttaatgaacctgcagcccgaggcaccatggctcagcgtcgccaagagaatgatgcgacccagctcactcgtttcggcaattaccccttggagcattacaagggtgagttgtacagcctgtgcaaggaccagcatggttgccgatacttgcagcgcaagttggaggagcgtaacccggagcacgtggagctgattttcagtgagacttacatgcatgtcattgagctcatgaccggtatgaaacatttaccccttgcaccctaacccattgtcattactaaccttcatcctcgaacagatccatttggcaattatctttgccagaaattgctggaatactccaacgatgaacaacgcactgctttgattgacaatgctgcccctgagttggttaagattgccctgaatcagcatggtactcgtgcactgcagaagatgattgaatttatctcgaccccgcagcagactcagacagttatcaatgcattgcagtatcatgtcgttgatctggtgcaggatctgaatggtaaccacgttattcagaaatgcctcaaccgcctcactcccgaggatgccgagttcatttacgaagctgtcggaggcaattgtgtagttgtcggtactcatcgccatggatgttgtgttcttcagcgttgcattgaccatgcttcggggcatcaaaaggctcgtctgatttcgcagattacctcacactcgttcgctttggtccaggatcctttcggaaattatgttgtgcaatacattctggatcttgcggagcctagcttcaccaacccgttgtgtgctaccttcggaggcaacattcctcagctgtcaaagcaaaagtttagctccaatgtgattgagaaatgcctccggactgctgataactacatgaagcgcgagatgattgatgaattcttaatgggcaatgagctcgagaagatgctgcgtgattcatttgcgaactatgttgtccagactgccatggacttctgtgacctcgacacccgcaaccgcattgtggaggctgttcgtcctattcttccatctatccgtcaaactcctcatggtcggcgtattgctggcaagattatggccgcggataccaacagccgcagcaatggtagcagtgctactaccagcggccaggtcacccccaatgagttgagcagcagcgcacagatccccaaggccttgctgcagaagcccttcgcataccaccaaggtggtacccagagtactcagtcttcgagctcatccggcggatacagcaaccagccctacgtacctcaatcctcccagagctctgtctctaacactccttctggacaaagtgacacctcgtctgtttacactgcgcccactcctcagctgtccgcaaaggctggatcgcagcaagtccagaactacttctgattgggtctgggatacccacatcagtgcttgtctttcacacccccagtgtactcatagtgagacgatgcgacgaaacatttcttttttttctcttcacgattttacggttactttttacactgtcatcgaactgggcctacatcaactgcacatgccatgatcatttatcccatgatttaccacacttgcgttttactgcatacaccttcgaagcaatgtgccatgatcattgcatttggccatgttgcatactgcattttcatgaagcgacccgtgcatgatgcagagctcgttggaactatgttcctctgctccctgtgtttcgcaacatcttgtatttcttgttttccattcccccctttattttcccagttgcctttcatacctaggtcttgaggatatctggcaatagttggatcgttcatcggaacaatctggtactccattgccttaatttgaggactggttcgtttggcttgggttgtctttcttcttttttttcctttttcgcttccacattgtgattttcaactcttatttttttacccattcatcgttgtacttttgcgctttgctcttttcgaactgcgttttgtgtcgtgcccatccttcacattggttcattgtcgcatacaagctgagccgagcatggatattacaatgagtatggagcctttgttcattgatgaccttggttgttttccggccagcttattgcttcctcagattgatgatactgccatttggtactcggaccagatattcgtcatgcatgatcctgcacacagtttttgcatgtattttagcaatggaaagctgaattaagttttcatacaattttctcaatatccaactctagtagatttctatttctttgtcttcgtagttcattaagtttccgaggttgtcaactctgcagcgcgacgcgtgatcacgtgcgtaccaaccgagctgcacttcggagctttagcaggataccacaccttgcttttgacaccaagtcagcctacaaggtccaaaccatttactgggcctctcatgctaccaaaagaggttgccagctcattgagcacacaatggccatgtcgcaatgtccagatgcggcagctagccagtctgttgaatgtgagtttactatgcattccttccattcgccaatcaccctcggagaaagtgactgaccctcaatatttgaatagcctcacgttcctagccctccaaccttggttgtccatggtatttctgcgacctgcaaatcgactatcctccgggccgtccttgctaccctcgaagtgccacacgccattgtcagaagttcggaatgtattacgggacggcatctcctgacgaaaatactatggaatacactggaggcactgggccagaaggaagaatgggagacctccggcaaaggaagatgcgagcacgtcagtggccttgcagtcttacttgaggagtgcctggcagcgaggcccgttcaaacgctaggcaaattcgtgctggtgctggatgagattgacaggcaaagagaggcaccgcatactttgctctcggcgctggcgcggctaggcgatatcgtgagtcgccgctttggacgacttttgcaagtgtaaaatgttgctaacccgataatttgtagattccatctctttgtgttgttctggtcctcagctcgaccccacggccattattcctccaaagtgcggctgttccgcacgtcagcttccctccctatacccgcaaggaggctatccacattattctcagttcggacgcgccggtcgtggatgggttgcccgatgaaacctcctcgcgggtatacccgtactttgtatctacagtctacgactcattggtgggaccaacagcaggctctataccggatttccggtccatatgtgaaagattgtggcctcggtttgttgcgcctgtagtgaatggcgaaacacccccgggcgggaacagtgagtgggatttctcgcggttgcttgtcaaaaacagagtcatctttcgacatcagggcgagtctgcgctggtgcaccacattgttcccgatgagactcctgctggcgagaaacggaccacgctggcaaaaaccgctatgccttcggccctcccttctctgccatatttctcgaccttgatcctcacatccgcatatctggcctcgcacacgcctcaacgactagatacaatcttcttctctaaattctcctcttcatccctttcagcccggaacaagcgtgcccaccaccgtcgacgtttgaaagtcctctcccaagcccaggccgaagagagacaagccgcaaacgatgacccttcaacccccaacaagaaaggaaagcgaactaaaactcgcattacaaaatcaacactatcatccgcctttgcgacctcctcggccaccacatcagctgtcggcggtggcgcaggcatcgccggcccgtccaccatccttacagcccgttctttccccctagaacgtctcctggccatctaccatgcgatcgacccaaaccccccagcaacaccacttcgagtttcagccgttgcagaccgtatctacgccgaactggcaaccctgcgacgcctgcggctcgttgtccccgctgctagccacaatgccatggcgactagtagtgggaataccactgccgatgcgggagataagtggtgtgtcaacgtctctggcgactgggtcggtgagctggctaagggtattggtgtcgaggttggtgagtggttggctggcggtctggactgattcgttttttctttgagatgaaggagttggtctttgtactggtgctttgttcttgcatttatcaacgggagttcttggcttgttggccctgcattgcatactggttttaattatggttaggtcaattatacccatgtcatcgttctacttgatcattgcctatccgtatgccagtaaaatgcttgcttatctcttagttgtggagttgcgtgttgctgcaaggccatgttcatcgagttctccctcgaatggctaattcctacggtgtgcgcaggggtatagattcggaagatatcttggagattcgacgtcgctaatcctccagtgtacctaacaatctatgctcgcatgcaaaaattaatcatcatacagcacaaatccaatacctgcattcgaactccaacaaggaataacaaagtagctgaaaacccaatcgccaagaaacgccaaagactatgcgtaaggtaagatccttatagcagagaagatggatgaacaaaaaaaaatccaacgccataccacctaccaagtccactgctcaaccacatcatcagtgccaaccaacaaactcggtccatgcgggccccgccactccggggtatcattcccatactcgaatcgcacacagctaggtggtgaggaatattgatgccctgtgagaggcgatgagacctgcagtccggtttggagagagaatagctggattttgcagtcctgggatgctaaagtgaaatgtatgttagcattagacgaactaaaatcgggatattctgatttttgaggggagcatacgactagccagaagaccgagctcggtgctcagatcgaaggttgggaacggtagtgaagagaattcggggaaagttaggtagggctttgaggaatcatgacgttcaagcatttttggcgcgaagcggaggtcgtacattcgtagctgaggtgaatgtcagttaaaaccagcccggacgtcgtatcggatagaaaagagaagaagaaggcgtagacagcgtcacataccgagctaggtcccgccgccacgagccggtactcgtccatctgcttcatttccatcacagcatcgttgtgtcggagacgtgtggcactgccaccactgcgcatgtcgtggaggaagatgttagagtttttctgtcccgccgcaatcacgtcctgcgacatccattccacggcatgcacgctgcgttggctgctgtgcttggggggtgctctggtgcgtgtgggaagtatattgcccttaaatggtttcttcgagagggtccaatggctactggtaccctctagggtgtgtagcccttctgaagttcctatggcaaagtaggcgcttgatcctgcgggctgggccgcggagcaccagaaggacatcgggtagtggggtctgatccgaatcgggtgagagactggaaggtcttgggtaagcacggtgtctagggatagagatacatataaagtcgtacatgttggccagcggtagttgccgccttcgtcgggctctgggaggagatgggccgaaaggaagcagtcaccttgcggtccttcgttcattgttgcactagagttgttagcagtgagtatatctaacagccttgtatggagacgtacagtaggtatcctgagtggctcaaagacatcgatcctaactagaatggggtgttaatgtgccttcaatggaacgaagtgctgggatcgaatgtgctcaccgaatacggctccctgaatagcacccgttccatggtgtgatcatagctccactgtgactcgtcaatgtcaggaaaacagaccctactcgctggttagtggtaattgacattcgccagcgctcatcaacttacgacacagacgattcatatccgcgagccgagccttgtcgcgcgtgttagtcacgtttcgagatcataaaagccagtgaaactcaccggcaatcaatgtcccagaacgtgggttgcgcaagacatatcggatactgtacgagctaggccatggctcgaaacgatggagttctccacgatgtagttggctggcctgaatgcgagcctgctgttcttgtctcgcacgggaggaagattcaatggctccaatctctctttggaggttgaccaagggatgtctcaacgatggcgcttttcggatcatctctttattctcacgttgtctgaaccgtgttttgttttcatgtgtctgcgattgattagcgaatctgatgaaatacatagatccctgctactgaccgctagctcagaccgctttcgcttcacggattgctgcgagtattgtgcatttgggggtgcaacatggttggcttgaatcttgaagtacttcttcttctccgggtctgtgatactcggtcagtgtgtgtagaagggtagttgatcactgcgtgtataaaacagtggcatggctagacagttcgatacagcccgtatgtgtcgctggaagtcaacagcccgcgcctttacgtactgtcctcgcgcacctcggcagaaggaaagaagcgcagcaaaacgcgacgtaccataatagaaaccagggatttcacgagtcatagttgctgataatgtgcgatgtcgagaaggtagatatcagggaatgcacgaagagggaaagtgacccagctatgttcaagttatcaagatagtcatgagccttccactttcgagtgtctagcacaaacgaacaaccatagtggattcgaccccaacaaagctaagcatgaatataaacaaacacaagtctatctgattaaccatatgagatgtggaagatcttgaatcgatttacatgaacaggcagttatatcagacttgaatttgaagacccgtgagtgacgtgagattatgtaatacatcatatttgtgcctcaggccgcagttctgatagctgccctaaacggcagtacacttgaactgaactgaaacatcttttgttcttgtttttgtatttgcttctgcttttgttgtgctttcattttgaatttgccctaatttatctaacaagattcacattgattaactccaagttctgatttcccacatttaatacacatatgccaatcaattgaatggtcgcgctttccaattgaatcggatattgcgaagagtcaatacattcaccacccgaattgcactcaataccattgactgaatgtcaactgagagcaacacagtataattgaatatttgaagacaccttgttatttttgcttatctttgtcccggtgaggcttgacaggcaaggcgaagttggtaatgactcccaaagtttcaccagccgaacaattgatgtcatcgtgaatataatttctgtcacttcttggacagattcctttccaggaccagggtgccgcatgattcattgtcacgccgtagcctgccactcattgtcaggttccgataagccagtataccttcttcaagcgtatggccggtcagtatcctgaatcccattgccgtagtttcgaagaatttctatagatagaatgaagaggcaatttctgacagtatttgctcattctccataggccgataatgacgctgcatgtcggaaaaagccctggcaggcggaggcaggcgtttgtaatgggccatgtgtcctcgatagtagttggcgcctagtcatcaagggtcgttccttcgatataaaacccacgatgccgaggctcggcgtttccaatattttctcctacaacacttgcaaccctttttctttcttcttcaccttttatcaccatatctcttgaagccatagcatcaatcccttcttctaggtatgtatcttcctggattattgttctttcatccgttgagagctgggcgtgcttatctgaagagcaaaatctttcccctgtgacttcccgttcatgtttcatgcaatttgctgtatcagagtcagtgatgtatcagaccaaacctcttgcacaaacctttgaattgaatttgtctgtttttgtttgatagtttgctgattcctttcagatcttactaccgtttcgccatcatggccagacccaaggttgacccgatggatcagcggaacgcacctctcaggagtcatccgcccggacctccctttcctgaagccagggacgagcatggttctcgtattgtttttattccgccgtgtggaactttctctgagagcgaccaacggggccgttcccaggaacagaaccaggagcataaccaatctcacagtcctttcaagcgacgagaccattctgaactgcctcccattcagaccagtctcctggcaggggtggtttcagattcctcgactcgcccttcaggtaattcgaattcaggccctagtggagagcagcctttcctgtccaagctcctcgacaaatctccattccatccgaacaagaccaccacttccggagaggaaaataaaggccatattcagtcgaagcacgatggttcccaagaatccaaggatgaagaggaatattacaagtttcgtgccagcttgagcaacagcttggaggacacttctcctattgaacagcaagacgaaagtggacagagcgacagcttgctatccgagaagaaagatcaggttagactgttccgttccagtctacttgctggtgccaaggcccaggaagatcgacgccgttccaagcgcactccgacatcccctgaccatcctcaaattggtcctaatgcggtttccgaatctgaaacgcatgcttccatcgttagcgagagcaaagactgcgtcattggcgttaaagagaacgacgacttttctctcccggagacattgaaacctatgacctctttccaggaagagagcgaagaatctctggattgcctcattgatgaactggaggccgaagatggcaatgaacctgacgatgatgcaaccactctccgagctggggaaattcgcccattccctccttccctgctggaaaccaaggtcgacgagggcctcaacgacgcagaggtgaccgttcggcgcaagaagtatggctggaatcgcatgaaggagcagaaacggaaccatttcctcaaattcatctccttcttcaatggcccagtccagtgggtcatggaggtaagcaagatcatcattgaccactatagcgtagttggaaaaaatatatgctcacactgttttctcaattacaggttaccattcttctagctggcggcctgcaagattggatagatttcggaatcatttgtgccctgctcatactaaatgccgcggtcggatttgcccaggaataccaagcggggaacattgtcgagagcctcaaggtaactcttgccctgagatctctggtcgttcgtaacggttgcatcgtggagataaatgccgaagacctcgttcttggtgatatcattcacgtggaagatgtgagttcatgaggaaataggaaaaaaagactcaggctaatatcccattcagggcaccatcatcccggcagatggcagactggtatgcgacaaggcctatattcaggttgatcagtctggaatcacgggggaatctctcgctgtggataaacacaaaggtgaccctgtcttttcttcttcggtagtcaaacgcggggctggaatcatggttgtgacggccactggtgatcacacctttgtcggaaatgcagcggtcctggttaacaaggctggcaataacgatggccactttactcgggtactgcgcgaaatggcccgtgttcttctgattctggtgcttctcaccctgctggttgtgtggatcagcagttattatcgctcaaatccgattgtccagatacttgagttcacggtcgcaatcaccgtgatcggagtccccgtcggtcttcccgtggttgtcaccacgacaatggccgttggtgcgtcttacctggccaagcatcaggctattgtgcaaaagctctcagctatcgagtcattggctggagtggagatcctctgttcagacaaaacgggaacactcactcgtaacagattgaaattgggagttccatatgtaacccccggaatgagtgcggaagagcttatgctgactgcgtgtcttgcggcaactcggaaaaagggcggcgtcgatgccatcgacaaggtattcctcaaaggtcttcgccactacccgtgggccaaatctcagatcgcctcgtacaagactcttgacttttctccatttgatccggtgtcaaagaaggtcactgcctatgtgcaagctctggatggtgagaaggtcctttgtgtcaagggtgctcctatgaccatcctgagaacagtggagaaggaaaccacattgtgcgagccgttcttcaaggaatatgaggataaggtcaccgagtttgctagtcgaggatttcgtgcactcggagttgcccgcaagcgtcaaggacggccatgggagattctgggaatcatgccatgcctggatcccccacgccatgacactgctaagacacttgccgaagctcaagaactgggactctctgtcaagatgctcactggggatgcggtggccattgcacgtgaaacggcacgtagactcggtctcggaaccaacatttacaatgccgaacgacttggtgtcactggcgccggctccatgtccggctcggaagtgaatgactttgttgaggccgctgacggcttcgcagaagtctacccccagcacaagtacagtgtagttgagattctccagcgacgcggctatctggtggcgatgactggcgatggtgtgaacgatgctgcttcgttgaaaaaggcggacacgggaattgcggtagagggcgcgtcggatgcggcccgctccgctgctgacattgtcttcttggcacccggtctgtccgcaatcatcgaggcgatcaagatcgctcggcagatcttccaccgcatgtactcatatgtggtgttccggatcgccctgtccattcacttggagatcttcctcgggctctggatggtgatcaagaatgagaccctcgacctccgcctgattgttcttctcgctatctttgccgacattgcgaccttggccattgcatatgacaacgctacttattcgcagtcccctgtcaaatggaaccagccaaggctctggggtgagtcaattgtcctgggcttcattctcgcagtcggtacctgggtgactctgggcactattctgttgcaaggcgaggacggcggtgttatcgaaggctggggttcacgagatgaggtcttgttcctggagattgctctgactcagagctggttgattatgataactcgcatcagtggatctaaatcgagatcgttctgggcaaactgcccatcattttaccttatcgtcgccgtgggtgctgtcgatctgaccgcaaccttgatggccgcatatggtgccttcggtcaagccacatcctggttgaccgtcctccgtgtgtggattctctcctctggtgtgacatgtgtaaacacactggcttacatcttgatgcataactcgcaaaggttcgacaaccttatgcatgggaaaagtcctcgaaagaagtacggagagcgctcgtgggaagacttcggtaagttcgcacagactcaatgtctcctcgcagaattttaacgggaaactaaccaatcataggccttaacatgcagcgaatggccaaacaacatgagaagaccacttagtggtggctcgtaaccccgcatactgcaattgatgatggtgatgaaataatgatatgatgaatggggagatgcctctaatcgatgcattttaatgattttattaaatcaaggaggacagaagaatggaaggggacaaagtcttgtttctcatgaggcggccatgcccaaggggttgaggcctgcacgttctattattatctggacgctgaactgtgattaacagaccctaatttttaagtgattatcttgactcattgcctgctattgtatattgctaaaccttttgatacagtatcaattttggattgattattgtcacaataccttgaagccttgacggaattggctgacatttattttggagaaaccgcatcgctgcggccttacgaggcagtttgacaatcctgtatagttgctggtttcattgtcttctcacatacgatgagtcaagcatgcaatccaaaccatatgacttcactgactactacagctgagatagtattacctgtttaccgctaggcacattatgcatatacccatgaatggaaatacggcctaagcaccccggagcttaggctggatagcgaccaagcggcttaaagaaccaaggttttaggattgaaacctttcctcaaaccttccaacattttccctgacaaccctgctaagctggatgtgtatatgcagccttccaagctcgctatgactggtgataacgtgattcaacgagaatatggagaagtcataaatcaccaaacatactaaaagtggatattcgtttgaaataacattgaaaccaatcggctttgatgtcttttgccgcaaaagtctacggttctgttcaaaatatgttaagaacctggcagtttggtctagaccatgatatgttccctcccgtctacattggaagtagggctatttgatggtgtcactagctagaaatcatccgtctacataactacataaaatgacataatagttgattatcacccttgatatctggattgtataagcttacaagtttagcttactctttgacatgctctttggactgaatttgaataaattacacaaaacaagaccaaggctctgatgtctcactttggaaaaagtacttgtacattgttcgtgtcctaaaaagcccctacatacaatggcaccgatgtgccttcaacagtggccgaactagaattgcgccccccaccgtaatccacccgaaatcatttaccgagcagttctgcctcggtgtcggcctctttctgaaatcgcttttgtcggcggtacatccgccagaagacaaggctgccatggatctgggctgcggagaatgccagatgcaggaccggcgtgacaaccttgaaggcaagtcgccaccggtcccacgtgcttccaaacaaccacatcgtcacaaccgtctcggtgagtgtccccactgcggttgagaagcaggagatgaggaagatcctgctcaggagctggtgccgtcttgggaagacccggtagaggatgatggcgaagtgggggaatagctcgaacacggcgtcgaatgcgcctaagcccgaatcttgttagaatttttttcgtttcgcctctagaacagagcctcataaactcaccccagacggtacagaggacgaactcgatatacgtgtcgggttcacgtaaaggtcgcagactgatggctatggccgcttggccaatgaagattgtcccaacgtggtgcatcacggccacgggtgacaacttcacacggtagatcagctcgaaaatgtagatcccaatcaagatttgggcgaccacaatcagcatatcacccagtgtcactactgagcctttgacaaagggcgtattgaatgacggccctttgcagaaagcaacactgatgaacggatatgcggcgactaccaagataatgacctttgtgactccagcaatgtggtgattcacaaagccacgacggttcagctcgctcatctctgtgtagatcgagccgtacagacggcggataagaaatccctcgaggacataaaaacgaacgaggaagaagatgaccagtacaagagaaatgatcaaggctgaaaatggtgccaaatcggagattggccctagttgttttgtacccagggggattgggtgagggtgtcttttggaaaggtccattgtcgcagcgaatggacaagaaacgaaacgaaacgaagtgacaggaagtaataaagcaaaatgatgcaagaaaacaaagaatgaaaatcaaagcttgtaatacgcgttattcgcaacacgcgttggacacctgttgactgtgaaatcggaaaggttgaggagaattggggaaggagtcgtaacaaagaccggacgtagggcaacaacctcagcccccgtggctgtagacagcaaaccccgcatatccccgtagaaattgatctgcctgtactaaaccaccccgatctataaataattcgctgaccctatagtatattcagccccacagaacatacgaagttacaccgggctcactgtttctgccttggaaatggggttttcttgtcttacattgaaataagcttttacatatagatggtatatggtatatgagctagtagataaacgagagaacccgagtctctagtcttagacaagcagattggtatacagatccaaacctcgaaaggaaagattaagcccgaagccaagctttgcatgaaccgcggcaaaagcttaagtagtgggtaccgcaggtactctgcatgctgattggctgtggtattctcccttaagggtcattccccttactaggatcggttactacaccctgtttaggcaacaagataaataacaaggcggtctgcccaatagagcgtggatatactatatacatggaccgtgaatagtggagattgcgggaattagggaattaggttgcctagaaagtttcaaacttcggaaactttccggggaaaagtcaattgggaattgtatctaaaagactgacttcatgaacacaatacaaggcgcggctacctacttagatgtatatgacttttaacttggtaaatttaatgaacagagctgataggcaaagactaggaaatcaatagaccttgagaatccctctgggaaatccaccaatggctagcttgaatagcaatggccagcgcaatgctcgcaaatctgtcaagacataagcgtcggagaaacagatttctccattcgtaggaattcctcgtttacgaggtccattgtgttcccgaaatccagtcgtaatatagaaagactgtatactgcactttcagaatactacctggaaacataaccaatgagaaggttatggtatacttggtcgcccggcccttgctgagtaggaaagctggggccctgggcgtcaaactttgcgctttaattagtgccactgcttctgctgcagaatagattggaagggaacaatggccgtgctacctcggccacgtgttatgttgtttcaacgctaacccgaattcgatcgccggaggaacaatcatccgaaagggagtaatagttgccttgtagtcatttctaatgacttttttgatatcactttgcctagtaaagtctgctcatttagagcaaagatcatcaatccacacatttggcacttggcttttattaccagaagtagactgccggagaaagccacattcaatggctcgagaccttggaggcttcaaacgttaccacagaatcgtaccaagtgctattttccgctatgctacatttaataacggtgctctttgcagtttggcaactcatgccgtaacgggatacattgttcctgcgacccaagccaacatccaatgaatggtagtttcaattgggcagtaactgtccaatttgaggatgatggtgaatggatcatacggtcacctagatctgactatggtcaattcccgagtgaattgagcggacggcttcttgcgagtgaggcttcaacactgaagtaccttggaaaggttgcggatattcccatcccagaagtttattcgtataggtaagagtatatagcaggagatatcgactcattcactaaactcaaatagtgcatataccgactattgattagcgtttcctatatcttaatgagtaaggcacaaggatggccgcttcaaaatgtctgaatgataatttcgagttaagggaatgcatgtcccggggtcatattctccacgaacggtactctttagacgaagttcctcgtggtccttttgcaacagagtctgagttctacaacagtctgataactgccgtgttacatcatgcagagcccctccctcttacgccgcactgtttcgttgccccaataccttcccgcgaggactacgagaacgatactgcccatcaggatgcctgtgatctttggaacggctttgtggccattggagacaggattgattccgcggagaatcggttggattacatcattgtgggagattccctcaaagacatcatggcccaacgcacaactggctacttgacacactctttaccggatccatttcctctgcatcaccctgattcaaatgccggcaatatttttgtggacgacgatttcaatattacgtcaataatcgactggtcattttgttcttccgtcccactggcgatcctattggctcctcctgggctcccccaatcccgatatgcacttggcaaggaccttatcaaggtctttcgggaggggtataaggagacgtcccgcctaaagtgtcatatagaaaggcagtcgtttctctcttccgacgcgctcgctattctagaggacagcgagttttcctggtctcttattagacttcttacgtttgaatcgaccgacgatttgcgtcttttccgtaccctctggaatacagttcacactcctgactgtgaccttgagtcttttatcatctcacagagacacttgccccattatgtgcgactgtacgaaaagatgcaagtagaaacaggcctattgctgaacaccaaatggcaaagggattattttaagattaccatagatttgacagtggcacgcaatctcacggtggttttcaattcgaatgcatgctataaaccgcatttgaatcgttttcgaagtgcgaagatgttcatcgcggacccgaaactatgggcatgggtctcgaaggccaaagagcagcgcgctttatgatcagactcgaggggatacagtaagtgcgttctgggccatctaactaaccacaactaggtcagatttctcttccagagagattgctatatacttcatttatgtgaaagctgtctgacttttgtatacatcaagttccggatttgctgtcatcatggcttagctgtagtggtatatatgtaaccgtggtaggtaatggatcagataaaatgagttatacattatcacagaattctatttacaaaatagcaagggtatcatttgaacatgcagaacgatggcatcatgagatccatgtcacccacgaagatttctattctataatatcgtaaagtcagcagctactcaactgaggtggagatagaaaaagacaatcttacctgtctaagagccatcctcctctccgaagctcgtcgcttccaccctttcataccgatagtgatgaaaataacaccattccaaaagccacgcagggaccccaacgtactcacagagagtagaagcgagtaagatccatgctcatgatgcgcgaattccgcgatacggttgatggtcggtgcaatccacgttgctagcatcgctaagaagaaaagcgacggcatgatcacatactgcctcagcgacacacgtctctgtttcggggtttgataagtagtcgaggcgtttctggatggaggcggacgctggaacgtattttgttccgtgatatcgcttgttatggtagattctggagtcaacccagtttttctccgggaattcgcatccgcgcttgtcgtgatgctgctagcggagttgttagaggtcagagcgatgtgatcgtcctcgctcaatttgaactcgtcgcgcactctggttatctcgataccgatgagagagtacagtattaggacgattactattatcagcctgttgtggaactattagaaaagtgcttgggcgggcgaatggaagtatgcgtaccatacgggtgcatagtagaagattatgcgcaggatcatccaactgcgagctactgagcaccagatctatagaatttttcagcctcaatgtttagcttcaagtcgattggtactcacggtttcgtcgccatatataggacctttctcatgaccgcggatgaagagaaagacaaaggcaggtatgaaggagagagcagtgataacactaatgtatttgacttcgagcttgcgcaaagacagagtatcaaaatgatagaagacaaccaagtatgtatccaaggccattgcgaatgtccagagcacgtcggctactggaaacctatatttttggggttagaatgtctttgcgaaccaaattgcctcgacaaatctctgtcaataccacatacatctgcagcgcgaagccttggaattgacatagcgacgaagtatccccagctgcaggtccactagtggatatcatggtggcgacagagtcgaacagattataaaaggcattgaaaaatattatacgatgaatagggctccggaagtgtcgcgagagagcaaaggcgccgattattgtgaatgagcccagaatagagagcactgaagagattcgccctgcaatggcaatccgattgagctcctcgggagtgtacgacatcgctcagaccataacaagatcaacagtcacaagaattgccaacatggcatctatttgaatttgattgaaatgaacaagaagacatagagtttgtaatatcacgttgtgccgatgagtattctttgtccgggatggcgtgcttttacgtattcaagactcgacagaatgaatggcatttgatgtcaaaacgctaacaatgacggagtgcggagtacacaaagcctatatataccgaaatggcgctatttcgagagctttaggttctaaatagcctcataactcttgataatggcgatgaagctgtgtgtccagatcaaggtggtgggctcaggccatgtagttccagccaatcatggtccactctacagggatcaagcagcttatgcgctatataaacaaaccaattgctaacaggttcctggatttagacaaacaacgccatgaccgcgagtcgaggccatttgccccttggtatctcgcaggtcggacaatagagacagccctaagaatgtagtagctgtgcctgtctaccatttggggatcgtagtcttaccagtgtcagggcagatgccgatctgtgtgactgcttccccttttcgttccgatcgggatctcgtgggacccacaggaatggccggacgctttcgatcggacccgacccgaccctgcacggcccagcgagacaaggtatgtaatgtgaaaggagaaagacccttctaagtacggagtaggttatcttgtctaagtattcgtgctacatctggtttatttttaaacagataaggagaaagttcggagacaaagagtcggtattgtcgctaggaaagaacatgtttcagctacgccaagaaaaatcaaatatttaactcgattatggattattataaactacactacacaggcaaaacaaacaaaacacacccaaatccttggttccgagcaagtggcattgcgcaagaagccggttccataggataccaatgtgggagcaacatgagcaaaggaaatgaaagggaatgagagggaacgatatacacagcgccggacgaacggagggaaacatcgatgcaaaggaagcgatggattggccatcaggtccatggcttccatcaaggaatgagagacacaggcgcaaacgcaaaggaatatgtaggagatatgtgcagtgggaaagggagggtgtcataatcaagtcctcgaagtcaaatggtcggcggcctagtctttagttagtatgatttaaaacagaatgtggaaggcaatttaccttgtcaaggttatagtcatacttctccaaggcatccaaggactcatcccgtgtgaagcccatgccggtcagccgctgaaggatcaggtcatcgccagtgtcgttgttcagagcccatccgggctgcttggatttcgcatcgttcgcgtcttcgccgatatcaggcttggcgttgtcaagaggcgcaaagagagtgtcccattcatgcagcgcagccggcttgggttctcccccgttgggcgatccgaccggcggggcggcggatgcatggatattgttgtcgaaagcaaagaactgagacgagctggattgggcatcggcaccggagacagcttgctgcttctgggacggggagtcgaaagagaaatcaaagtcagttgtgtttttggcctcctgaccctgtggctcgtcgtcgtcatcgtcatccgcttcgatcgcgggcgcaagattcattcccgcaaatgctgcctcaaagtccggtcctcccaccttcgctccaccgggtgggatagcagcatccgagacagaatcacggttggtctcattgcttacaactggcgcacccgtggtgtgctccactgaatgaggcgcatccggtgccacagtcggatcgccgcgctcgggcaataggccattgaattgaggaggaagatgaacgttatcttctttagctgtctcgtactctggagggctctgcagcaccccaggagatgggggtttgtttgaggttcccgggacagggaaagcagccagctgagcggcgtcaatggaatcctgttgggtctccttttggacatttggtgcgggaggcgtgaaattatcttcgaatccaaaagcaccctcgtcatcagagctctcatcttcgtcatcgtcatggtgtagctcttgaatcggggggaattcggatggacgtgctgatgcagctccatttggctgctcagctccaggtacaggcttcatagaagcaaacgcctcctcgaagtcgttatcttgctgggattcggaccgtttgtgtgccttgctgccgaacagttcgtcaaagcttaggtccttgccgtcttcgacctggctctcattggcgacaggagttgctgcagattggggctgctgaacggttttggatggctcggggaacctaactgagaggtcttgtccttcctcctcaaacggggaccgtgccggggtgccttcaaaagttgaggttggtgcacgcgtgtagtcgctagattctgccccggatgtaggtccataatcactgctagccgcctgggaaggcgtagcgattccagaggtttcagcgccgccgaatcgactcgcaggaggcgagaccatagtagacgacgtcacagactgattatcgttgaactgcaggaagtttggggtcagttgtcgggactgactcgcaggcggtggctcagagaagaccccagaaggaaatgcaccaggcaaagagccagggggaggagagactgatggggtcgtaacagcagaggtaataggagatgtgactgcaacctgtggcgactcggagcggaacgaagtgggtggtggtccggcagcagggaaagctgcgaatggctgtccgaagaggctgtcaaatgccttttgctgatcatttgacacatcgggggaccgtgcctgttcactcgagctaccagttcgacggaaaaacgggttggtgttttggcttgtcgtagaggcagcagggcttacaacatcggccacactgccggctggtgttgcagactcttgggaatactgtggggtctcattggccaggctgtcaatttcaccctggagcttgtcccgttcgccttcgacggtagctaattgctttttgttaatggcaacaagacccttctgttggcgcgcagaagatcgcgccttctccagtgccggcttgagctgggcaacttcagcattggcctggcggatcttctccttcaggctggaattctcctgctcatcgctagccaaggctgtcgaaacttgcgtgtattggttttgcaaatcctggcggctgccatccagcaaggcatattgctgctgcagtttctgcgtctctgccttggatgacttgaggcgctcctcgagtgccttgaaattggtaacctcttgctcgtacattgaccgtgcttgcgcaagacgtgcctcgaagtcacgcttctgctgcgaggtttgtgtaatgctttgttcagcaaaggtcctcttctcctgcacagtgtgcatttccttggccagagaacctatttggttggacaagttcgccagctcagtagtctcattggtcaacttgtttgattcttcggggtcattgtcaccgaggagatcatccgatggaggcgggggtgagcgaactgctctcggggttgccgccgatgcaccggtgatctgtggctgcaagctctggccaaatgtagaggttggaataaaaggcttgaaggtttgcgatgctgtctgaggggatgccctagaggaaggcgagcctggagtctggaaagcactattggagcctccggtagactgtggcatctgaggctgggcgaatggcggcgcgggcgaatcgaggccgaacaaatcatcagcagctgtccgcacaacgggggcgggagccgggggaggtgtgggggctgccattggtgcgggcacttggcggcgcatattgggcggaatgagcgcgggcgggaccacctgtggcagcggctccttgccgctacgctgcaatctcaccaagtacatagccacggcaaattcttcccggctcagctggccgtctgcgtcgatatctgcaaggtcccaaatttgggcaagcgtctcttcaggaagctgggccttcatgaagaaagatacagcttggtctccagtaataagtcccaacttggctgtgtcaacagtctcgaatatgctatcaaactgggccttctcttgtggggtaatcaaccagtcaccaccggtgacctgggcggaaagagagcctacaaagggggagcgattggcttgattcatagggcttgtagttcgctgagggccagtaaattgctggggaatggccgggatggggggcacatcgggtctcgccccaaaagacacccgtgcaggaggtcccctgcgagctgccgcatcgtacagaccaggcgggagggtcgcagggataccgcgcagggcgccagatttatatgatgtcagtagatgcatggcaatggtaaactcagtggcatccaaggcacctcgctgcttagtgtcagacaaaaaccagatgcgacccagaacctcatttgggagccgagcgcgttcgaagatctgttttgcaatttcgcctatagatcaaacagcgaacttgtgagattggcaccttatctgcagggaagagctacatacctgagatcatcccgttcttgacgtccgacttctcgaacagcgagacgaatttattggcatcatcaggctgaaggggtggaacacgaataggtccattggctccaggtggagggcttttggttccggattccgggacgcttgccgttgtgtcgaccacaattccgtcaaaacgaggcagagggccagctatgaataggtgcgcgatcagcatggattccacttctctgaagggaacatcactcacattgcagagccaactcgtccgaaggtgcacggccagcttgggcatgtccaattaaccgcagaacaatcccgaagccagatggggtcaggaggcccctgttctctttatcggcaatttgccaaatctacaagacccctcattagctatccctctcactattgcaatctaacacccatattctatccacataccaggccgagagtatccggggataggtgagtcttctcaaagaatggaacggcgatttcaccggtaatgaccccgaggttggtggtatcggcagcctggaaaagctggaagaatacgcgcttttcctctggagtgaggtgaagattcgggtgtcgctgtgctaaaagattgtgttccgtcagctccgctagatcgcgcatatagagtgcgagtgcaagaaggggaggggtggtgatgacggaggtcggcgggcgtttcccttgagtgcgccgaagctctctcacgattcgtattggctctagcaaggaatattaagtattacttaccggtatcagccattgcagtgtcctaggaggagcttaactccccgccttctaatgagttcacaatcgttgggtgccttggtggacaagttggagacacgggatgctgtcagcctagtctgaactcgcaacaagcatgggcggagcgcagtatttgacagggacggcaagggcacgagatataggtaaatctcgagctccaaggaggaaataaacttcaagaggaatggggattgaaagtggctggaatcgatgtcgtagggaaacgttcctgtggctctcaaggcggtcagtcggtctagcgcccatcctaacacgttgtctcgccctgaaagggggataattctaacttggtacaaaggataattgaaagatgtttatgaatattcaagtctgccagatgatagaatggttcttgcacatgttgatccgaggatattggttgttactgtggtagtttctgaatctcaattgcctatatacaagcgacaatatatgccagctggagaaagaaaggggagaaaagaggaaaaccatgattatagtaagcaagccaagtatattcggaaaactctctaaagcatcactcaaaggcgtgaactgatagatagactgaagaccatagacaaagcgggaactacaagacgttgcatagacaagatccaacattggcagctcctaccctgaccataaaaagtgttagaactctctctcgattggtacgtgtcttcagggtccttttgtatacttccgataccgacgtgatcttgaaagaaatacaacgtaaggtcctgtagcgtctgctggcagcagaatatataaacgttcgaactggtctttcccctgtaacgtctatgcctgcggattatgtgtattaccctgaaatctacaatcaaagccctacgacagctcagttctagtcatctgcttggcatttacttggttgcctggccttccgggtcttgatcaactcatgcagctagttcatactgtacggtaagaaatcatggaatgagaggaagtgtatacatgtattgtattcgccatttgcggagtgtaagagaagattaaatctagtcatattgcttcggtggtaagttgtccgcgtagttacagggactggtacgctgacttctgcgtcaggggcagtgagaccgtcgccgcctatattccaatgatacattttcagttgaggcgtgaggtatttcagagagaaccagaatacaaaatccgagaaagatattgagaaacagcgtatggcttcacggccttggggctatgcaagcccggcgcccaagacattgattcaatgtccgactatgagacaacacacttggagagtcgacttagttacttacaaattgtacactttataagatccaaggagacagcgttagaaagtaataacaatggcatacgtatgtagaaaccctaaaggtggatggaacgaggggaaatttcatcctgcttcagggatattaaagatatatcgaacaacaaagccagaaaatcattggcagcaaaacgtatgttcccttctatttgcaagaagcccgatacacgcatgaaaaccgaacctccagactcgcgttggtccccaagccaacccgtagaagtgaaacaaccaagagtccgaagaccggtcaaataacatggctaatctagtactcgggctccaactcctcatcaccctcgatggagtcggaggcgacctcctcgtaatcacgctcgagagcagcgagatcctcacgagcctcagagaactcaccctcctccataccctcaccaacgtaccagtgaacgaaggcacgcttggagtacatgagatcgaacttgtggtcgagagcggaccaggcctcggcaatggcggtagtgttggacagcatgcagctatattataattagcaccaaatttttaatcaggtttcaagacccgaaagaatcaagaagaaaacttacacagcacggctgaggttagcaagatcgccgttggggacctgcatgggaggctggtagcagataccgagcttgaagccagtagggcaccagtcgacgaattgaatggtgcgcttggtcttgagagtggcgacggcactgtgggcgtccttggggacaacatcaccacggtaaagcagacaggtagccatgtacttgccgttgcgggggtcacacttgaccatctggttgttgggctcgaagcagttggaggtgatctcggtgacagagtgagcctcgtgggcggccttgtcggaggagatgatgggagagtaggcgaccagagggaagtggatacgggggtaaggcaccaagttggtctggaactcgttcaagtcgacgttgagggaaccgtcgaagcgcagggaagcagtgatagaggaaacaacctgagcgataaggcggttcaggttctcgtagctggggcgctcgatgccgaggttgcggcggcagatgtcgtagatagcctcgttgtcgaccatgaaggagcagtcggaatgctccagggtggtgtgagtagtgaggatggagttgtagggctcaacaacggcagtggcgttctggggagcagggtagacacagaactccagcttggacttcttgccgtagtcgacggacagacgctccatcaggagagcaccgaaaccggagccggtaccaccaccgaaggagtggaagaccaagaaaccttggagaccagcacaagcgtcggcaacacgacgcacacggtcgagaacctcatcaatcatctccttacccacggtgtagtgaccacgggcgtagttgttggaagcatcctccttaccagtgatcatctgttcggggtggaagagcgaacggtaggtaccggtacggacctcatccacgacattgggctcgagatcggcgtagatggtacggggaacgtacttgccctgacctgtgaagcgggggagaaagaatgttaggaagctgtgctttgcaattttgcatatcaaggcgggggaacattgaaaaaatcagggttttcctaccagtctcggagaagaaagtgctaaatccgtggtcggggtcggccttcttgcgctcctcagtgaggaatccatcgggctattatccatgttagtcacgggtgtttacctctcggcaagaaaatagggggtacgggtgcccgagtcaagattgggcgccagcacgagtttggaattccaacgcacctggataccgtgctccagacagtacagctaaaaaatcaatgctgttagtttaccgaatacttgttcctcgatgggttgtggatagttacctcccagcaggagttggcgatctggcaaccggcttggccgactgtagagaagggtcagcgcattcatcgaagaagatatatcaagtctgccgagtagactcgatggacgacgtcgacataccgttcaaactgataatctctctcattgtgatcgagtcgatgttttttcaggctaaaaaatcagggaggggaaaatgaaacccaaacaacaaacgcgacggtctggaactctcagttaggctcgaatacgaagatgcacaatggaagggggcggggttgggcttcgtacctgaagaatggaggaatggacgagaagatggaaaggaaaacaaagttgaccagaaatgttgtggaggaggaggcgtctgtgctgtacagggggaagttcgttgttgatccgttcgttgggtcgcgtccggcaatttgattggctcctccccggtgaggagtagcggctactgaccgcctcgtagtgatctcgtgatgccacgtgatatcattagtaccttgtgacatgtggatattaaaaaaagaatacaattcaagcttgaatagttaagataattcggcgctcgaagtttgccaaatttgtccagtgaagtgcccagggcaactcatcaagggtgtgtggtctgacgctgttggagctatcgatttaggatccactagggggaaccacctcgaaccaccattcgaccatcatagccaaagtactaagacacacacctcggtacagtatatacattccaacattgcacattcaacttttgaatgctaattgaactcttagcactacaattgtcaaaaactgcccgagtctcgtcatgggccgagaataagacatcactaaaacatcatctcgttcaccaaaaaactccctatattacaaagcagaacatcaagtctctcatcatgcatataaaactcattcccaccctgggactcatgctcccgctcttcacagcagtggcgcaagcaaacgtggaaaagaccatctttctagcaccaataccagcaatcgtcccttccgagcagccagacctcgacgacctaggtctagagcgtctatcaccacagaaacccgtggtgcgaacccagctaaatgcctcattcccaacggctgcggccccctatggtacagactcgtggttcttccttgaaaacctgaacccgggccagcggtatgaagtacgagtgtgctggctagcgacagtaagacaacccactaatcctccctctcgatcgtcatcttttacgcatgtaatacacatcaccgtatataaacacaactaacaaccccctagcaaccaacaacattcaccctcaccacctacccgctctcaaaaacaatcgaagacaaaaacctcctgtcttccctgagcatgtacacagcagcccgactcgcagcagcagacacaatccaagaaaatgtcatcccgcacagtgccaacgcacgcggtggcaaagatgtgctcgaccctgtgccgacgagtgactcggttttgtttctgcatgtgcacgccgcggcagattacttcagtacagatcaggcattgatgcagaatgtcccacccgtggcggtggatttgattcttgatccattcttgtttaatgttttcccgcgctcgctggtgccgactgctgggtggattgtacttgttgctgttctcgcggcagtgctggggaggtggattgtgaaggaggttgggagggctgtggatgatgctaggaggcaaagtgttttggaagagatgaagaagaaatgaggttgtggttttccaaggttgtgtgtgttttggagatgtacgattgaactatttaaccgagcaaagaaaacaactgaaatatatttctttgttcctctgttggaacctaacgtggtcttttggcgactacctcactgttctgggaatacttcatggcgtccacgggaatgttaggtaattaactatgacaacgaaggttattaatgatgtccaccgacgaggaatgagtgggagccgagttatgcagagaatacccaatatcatctaagtaaaaatcttataaaagtactatcatggactctacattatcattagttacaagggcaagatttcgtagccagagtaaaactatagacaaggccaaatgacatagacgtgaaaggcaaaatccagataacataacagaacaattaaatgtcgaggtcgcaaagtcagatacatagggaggtgtgcttggatacaggatgagcaagggcaatggggaattcaaagggaaaagccaaagatataagcactgtatatgaggcgcaacagggacaagggtaaagcaaaaaaaaaaaaaaataccaaaagttcacgcagcaggaaccaacgtatagggccaatcaactctcccccgtttctttcctctctatatgcgtctccaagaaacctgattggcatttatgccagtctattcaagataagcccacgctcatctagatcaaaggacaagatcacaaactcccgttaaatcgtagctccatgaatggctcagccattgatacaaataacgtagcttaatcttaagcttagtcttcgaagaagttgaggatcgcgcggatacccctagagcccaggccgtgggacgggtaggaaatgtagagcggatcctcggtggcgccgagcttagcacggaattcactcttgcgcacaagatggaactgtttagcgagggcttcgtaggtgtgctccaacatcttgaccttggttccctgcaagttgtgacctgcggtgaactgggcagtggcgccagcgccaaatgtaaggcctttgacgccactcttagcggcggtctggattgcatgcgtgacaatatattcgatagtaccgctcggcgcgccggggaaatcgagactgtacttgacttgcataccatgggcaggagatagcattgccaaagcgacgaaggcgcagacgacgccattcctgtccagagcgtagaagtaccaacggtgctcgaagtcgcaccatgggcgaatctgggacaggtgcacttgcgcgcccttgcggttggacagccactcggtgatacggtcgtcaatcttcttgcgaatatcgtctggaaccatctcgccttggttcatagtaactagcttaacgttctcggtctcggcgcgacgcagcttacgtgcaatctcgccgtcagaagcggctaggttgcgcgatgggtcaatgcgctcttcggcgatacaagacaaactgcgccagcctagtcgttcgccaagaatagtctcgacttcaggcgagcagaggatccacacgggcttatacttggtttcgcggcgtagccactgcaagaattgtgtaattgtgcgtgtgtactgcttgggatcacaggctgggttaccgggaatgatcgcataattggaggagctgggcacgtaggcgacagctgcaccagtagtcatgtcacgccagatcttgaagcgttcatcaaaccaggaggttgatgtggcatcgccgtagttagcgaccagatgttccagaggctgcagctcactgacgtccgaagctgtccgagccttgtgctcatggtgccacggcggttcgatggtcgatgattctgggtggcggaggttttcagagacaggctttgctggcaaactcttggggtcgcgagggaacattgacgtcagtcggatgttgcccagcttgaggataagcatcatgatacgttccagaccaactccggcgcccgcgtggggtggtgcaccccagcggaagccctcgagatagtcttccatatcatccgggttaatgcccacacgacgcatgttttcctccagcatgtggggatcgtggatacgttgaccacccgagacaatctcttgcccacgaatgaacatgtcaaatgagttcgtgaagttgtcgtcatcaacgtcgggcatcgtgtagaagggacgtgcaccacgagggaatttgtcgaggacgtagtaatcagtgccgtacttctccttgacaagctcacccaagtgaatctcatcacgggtacccaagtcctcgtcaaaaggtagcggattgccctcttcgttcaaccagcccgagtcgttcaacatcttgataccatcggtaaaacgaatgatcggcgtcttttccagccatacgacatcttcggaggggaactggtacttgatgagatcaatttcgcggcggtgtttggtgtagatgcccgtgaggatattcttaatcacagcatcaagtgtctcaagcatctcatggtagtgctcatcaatagccatctcaagatccaatccagtatattctgtaagatgacggtgggtattggagttttcggcacggaacacagcaccaatctcgtagacgcggccgaaatcagaagcgatagccatctgcttcgccaattgaggagactgagcgaggaacgcagggcgaccgaaatagttgacttcgaagacactcgatccagactcggtagcagcgccttgcaatttcggggtatggatttcgataaagccgcggtcgtcaagggaagtacggaaaagattgcatgtcacggactgaagacggaagatggattgcgaggttgatgtgcgaaggtcgagaatccggttggccaaacgtgtccggtcagggatgtggttgcggcggccctcgatcttttcttcttcggtggtccgaatctctgcctcgtaaacactgaaggggacaggctcctcgcggcgaacttggaggtgaaccgaatcaatggccagctcgacatcatgaactgagcagcccaacactggaacctccggtttctgaacagtgccgcggactgtcacaaaagagcccacccggaggtgctccacccactggaccatggcgagagagattgctccctcccgctcatgcaaaacaccttggaaggtacctagctgttgacggaataccaggaacaccagtttggcactcattcgacggatgacgtgcagtcgtgcgctgaagaacactttctgtccctccatggcaagacttatgtcatcgagccgagtccgcacttctcgtgttcgaacggacgactgcattaaaggaagctcgccataacgcgctttcatttctggcgtctcctcggctgtggatttggcaatttcctcttccttgcggcgatggtcggtctcggagaacatttcctcgctgagacgactgcgctcgctgcgacggtgctgacgcaccaaccgcttctgttggtttttgctcaaggcaccggtagaagagtcgtcggagacatcatcagacgaagagatatactcattcttatcacggaggaagttgccaatgatgctgcgacgaggggatgcggtaggagaaccggaccgatctgtcgaggtacgaacttttgatggcagagcagagcgaacgttggaaccggaggagtcatcctcatttcccaagtgtcccctaatggccttggagagggcacgtttaatcgacataatgtgcttaagtttatgaagggagggggagaagaaaaaagagaaagaggagggacctcgggactttgtatatatatgggaaaggtgggggggggggctgcgccggaacgggcgatttcaaatatttcaactctgggaaggcctagagggtaaagagtccgatagcaaaacaggcaacgcgcacgtgaattagaacaaattgagccaaatacaatgacagaccaagagtttaaagaagtagagtcaatcaaaacacacacgtaaatttccaaacttataaatcctgcacacggccacagggctggaaaagatgtgatgacatcatccgaaaccaaggaatccagattttcttggtatggggcctggtggtccctggggagaactggccattgcttcgaacttacgactttgtttccctattactccaacggtttctctctcgttattgttatttccctcgttagtatcagttggctgttttgttcttcgttcctcggccaatgtcagatatctcgtctggtcttcccgtctgtccgtcttatcttcttatcaccgccggcttccgggcccctccgatgcgtatgccagatcagtagatcgaatccgttacttttcactacagcatcatggcttcgtctcgttggtggctgtatgtacaggccatattttggcggtttctgatgcgcattggcatgttcttgcacgagattggtccgcgcccaccccgaccgttattcacccgtaccgtgatatccgactcccattgccatccggtcgtcctccacttttactgtccaccggattatccagagcagcgaaggctaggccatcgcttccccgtcgctgtgaacttccacggaggcggtttcacgctcggtgctgctaccgatgattctcgctgggcgaaaatggtgctggaggataccggcgccgtgatggtgagtgtcggctaccggcgagcccccgaacacccttttcctgcggcagtagacgacggagtcgaggccctactgtacctggcaacacatgccagtgaactgggattggatgtgagccgagtggcgttgagcgggttctcggcaggcggcaacctggctgtcacggtgcccttgcgactgcgtggcagaatatccaccgaagtgaaggagcatttgggtcgagccgaatccacgcaaaatctgctcagtcaggtcggcgatcttcacatcgttgcattgttctcttggtatccgattctggactttgaagaatctcgcgatcaccgtcgcgctatgagtctgatgccggacaagactctccctgcatttttcaccacactctttgatgaggcctatcttcctgatttggacgaacgtatatccccctatgcatctcccatccacgcatctgaccgtatcctgtctgaagctcttccccgcgacgtctttttctttatttgcgagtgggatatgttgatgaaggagggtcaatctttcgttcgccgattagagagcctcggtaaacgtcctcgcgccatgcttattgagaaagcccgacatgcgtgggataagtcacctaatccgtggcgggaccaaaatcgcgtggaccttttataccgcgatgcctgtgcggatatgaaggctatctttgaccggtgatcgatttgcttgactatcaatcttcccatgttttcttctcttagcactgcgggcttgaccttggcgtttgaaccattcatggtgtcgactttacatagcgtttttgatatgtttatcctactataactttattatcctagtctacaacgtacataaagtgtacctgtagctgacttatccaattgcattcgatcgcattggctgggatcatgtatccacctcagtggcaactttaaaaccaagcggagatggaaacatacaacgcctatatgctaacaaaaggacggcctacatatgtacgatgtgccaaataatatcactcggaacctcctcctttccattgtagtgcctcatctcatgccactttttgaccacaggtaaagacactacctcaatgcttatgtataccctccgccacttcttggtcactgacaggcatgaaaacacctggtaccagcaatactcatatttgcgccagcaaagctgcacaccgctgagcagagttttccgtgcctacaaaagacacgctgggacgattatcgagaccgatttcaacaagtgtcgaagctaataatgttaaggaacaaatcatctcgatcgaagcagtgtggactcaccgtcaggatcataactgggccatcccagggctttcagtccgtgttcgggatcagcgatgaatgatccccaggcggatcgcatctgaacctgcagctggcgctgcgcatcagactcagcaatcccagtaatttcagcagattctccaaaaatcatgttaaattcgacaccatggtatgctccactggtagggtaaagacgggtattctcccagtccgcgttgtattgaaagcgccaaaccggtgtatgtcgacgacttcggtgtgcggcttcgagattggatgggcagaagaatgtctgcatgttgaaatcatcccactgttcgtctgtcagtgtcgatccctgggcgtaggtcgcgatcttgtagaatcccgcttcattggcgttgtgcccgaccaagtagggctgttggagaatatggttagtagctacattgacccatcgactatatttgagatgtaggagagcccactcacgatgcgggcgaattttccttgctgcgaaagaagagtgtaattctcaaaaacagtcacgtcgtccacggtgggctggaaagccggggatttccttgcagggtttgtagtcggaaccttcactgcactagcagcggcgagaatggcactcgcattctgctttctcatgcacggcaaaacatcccctgaagacccacagcctaactgggcagacacagtataccaatgctccgctgcagttgtcctattgtttgttgggaagctgagagctgtgccggaatgcgagatcaaaccggtaactaggggttcggactggtaggcgtatgcccaataatcaacagaagcacttccgcaagactggccagatatagtgatgcggttaggatcacccccgaatccacgaatattttgcttcacccattcaacggctaaacgttggtctagtagaccaagattaggagggtgtccaggcaggccaggaaacccgaatatgttcatgcggtagttgaccgtcacaacgattacatcctcagtaccagcaaatccgcctccataataaaaaggagtatcagtcgtgccacttgtccatcctataacatggatcagaaacaagacattggaaaataagtagcaaaaacttactaccaccgtaaaaatgaacatagacgggcttgagttgatttgagtctggctttgaccaaatattcagagtcaagcagtcttcactttgagtgttgttatttatagccgcgaaggcctcgaagatgctgtcaaattgcggagttttgtcgggatagtcgaccagcttcgacaccgagtacatgcagtctctgtagattgctgttaaagaaagtagaatacaatcaccgcaaatagcactcactttccctatgttacgttcatgtcagacattcatacattttatgcacttcgggtgtaagggataagttgagaccatacatattctgaggcgacatgaacacccctcggcgtgtaaggttggggcggtgcgaatcgcaattgctcgacaggcggctgcgcgtaaggaactccgagccattccgtgacccctggattctttgatgcctcatggccctgaatgattccattcgacccgacatgggcctgtcgcgctacggcaaccactgcgaaggccagccatattactcgcatgatcaaatatatccctgattgagtcggaggggcaaaatcgagggaaaatagactgtgagagaaaccgcgtgttgaaaatcaattgacgcatttaatatatcgtcaatatggctaagtggggcttgcatatatatggagcctgtagaggtaagccctagtcgatctggcgtgctttgattcgggttcgctgtctcaagtctccatttggcccccaatgagccgtcccaggtcatatctaatgcctgctcgcggaacaccggaagccttgatctttgatctcacgagagacagctctctctcctcgctttgtactcatgaaatgcacattggctatagcctatgatcgttccgatctaatccaaccccatttggcttgacaatgttatccagagtatgacattttatggccaaacaaatgacggtgtcccagataggggccatgtgcttttcattaccgcgcttgtgatggtgctcactgcggccatatttgttaccattcggctagcaacgaggattcatctgaaaaaattcggttgggatgatctgttcctcgtcatcgccctagcggcatcggtcatgacaacaattgctgtcaatttaggtaagtcaaaagacatctgatggcgggtcttttagtcacaagctgacctttggtttccagccgtcgtgcatggttatggcaggcgaaaagcagatatgggagagggtatacatatagctctgaaggtgcagtgatatcaacggtagctaatgctcgttcaaatctctaacactcccccaagtggttttttgttgcccagattccatataagattgccctcggctttaccaaagcttctatcgtcctcctttacctccgagtatttatcacagagtctttccagcgcgtgggaaagggtttcctaaccgtcattgccgcatggacagtcgcatcagtcctcgtcacaatctttcagtgtatcccaattgaagcttcttggaaccataatatcaaagtcaaacaatgcgtggacaaagacagctggtggtatgcatttgcgggaattaacacggttactgacgttctgatcgccattctccccattcccccagttcgccacctgaagctctcgaagcgcgaccggattgggttgtgttttgttttcggtgttggagcattgtatgtatcatttcatcctctcttctctatgcattaatcaggagtctcatgtgtacacagtgtctgcgtcactagtatcatgcgtacggttgcagtgtctcaaacatcgactggcttagatcaaagctgtgagtatcttgggagcctcgaaaaaagggaatgcagagaacagttgctgatcaaaatttactataggggattttatccctcgctcagtctggactctcgtggagtgcaatatgggaataatctgtgcgtgtctccctatgatgcgccggccgctaagttttctgtttccgtggcttttcagaggctcttctcggaatgaatcagaaagacttagctatgttcccattgagttgaggtatacaaatcgccaactgcgtccgcgcgggagtcaaagccaagaggaaattctacagtcagatgtgcgagataaaagggctttggcggatgaggaataagataatcccatctgtgctacgacggagattcctgtcggtttttcattgcttgcgggttccaaactgcgtacaacacctttagattagagaaagaatcatccaaacggacaaaatatgtatgttaacgatcctcaatatctgcatgtcgtttattcactagtctttttgatactactggtgagcgccatagtcagattcgcaaacaaacagttatggcactgggagttatttccatttaaaaaagaggcgttggttggtttatgataacgcgattatagagaaatttctcatttgaactactattacagattctgcgagcttgtcaattggaaaatggaatatttgcattaatgtagtgctgaattttgcagaggcagtgtttcgctgcgatgagtaattccgctagaggtcttcaagaggctctgagtggccacacaaggatagtcatatcgtgttactatgacaagccaagcaaacgagtatttacacaccaggaaatcttcctggttaaagtgcccaccgaatgaggtatttggtggatgaatgttgaatgtaacaaatcgagagtagtggtttgtaagtttttgaacaaacaactcaaaattcgtccctcaagcctgtctcctgctcctcgctcaaccgtttctcattcaatgttttccaccatgcgtgcgatgggtcttggctcggtccagtttcatcccatggcttcgggctgaggatgtaatgtacatttttcacattctcatcgcgccatatagcgtcatgtacaccttcccaccgcaaggttttgagtgcgttgtatatgtacgggagtgcaacccagcgaccataaaacaggtcaccgagaagggactgatcggcaaaatcataattcgatgttgtagaagcaccaagctgtgcaagaatcttctcataggttgcctgagctgggatcaccacctgaaggcctccattgggtatccccaaccctgaagtgggtgaagcaccggcgatttgcgcgatgtcgggattttcatgctgcgtagtatatgcgcaattggccggaatcctttcagaattatcgaattagctgcactgtatgtcgcgcttgtatattcccaaataaaggttgctcttaccagtctgcgggatagtgaggtttatgaagcggattgcagctgcaagcatggctagcggcaaagactcgatctccgtttccagccatttctggtgaatccaattcgacatccattaattcatccatatttttaaggactagcatgtcactgtcaagttgtacgacacgctcatattcaacaagtgagaacggtgtgagtttgctccaacaatcgtagaatcgtacatcgttggtgaaatccttgggagctgacggcaggagatacggcacatggcgcttcaagattttccgggaatcaagggctttgtggccttcggcagggaatgtgtccgtatagagcacgacaagcggatactttgacccgacctttctgagagagtactcaagggtcaaaagcccagagaggtatgcagtatttgttatgagggtggtccacactgagaattgttatcatccggagaaagaaagtattgtagagtttcagattgccctgtcgatctgtaccttttgaggcatgtggctggaggatattctcatccatgatttgattgtggcgctgaaattgcttttttttagctctgactgtgattgattaggtgagaagtcagcactcacatttagcaattgtaacgattggaattggctgttgcactaagtacaatgcagatacagggagttagtggagtgacaagggagcgcgcattgtgggtgaggggttcccgaggtcccttcctccggtatcggtctacccaatgaggggttaagggttagttgtggtgtgcatgcaattagttagcatatccaatgaatgaaggccacgttcggctggataacactagactggaaagaatttattagcgaagcactattattcgtcggatttacaatcagagttctttaggctaattagagtagtcccgtggcttgacctagtttctatttggttcataactacggagtatgtaacccgtattgatatttatgctcttggtgagctgcataactatcgatgtattaacctacgtttattttctatgtacttcttcggttgaaactatgtggtcttactccgaatgacaatgcctcaaagatacaagcgtgcatgtaacgagccgaaacacagatattttagggcttggttgcttaaccgccgacgctaggctcaatgcaaatcgatgtgcatcgatatagagtgattggacatctccgggcgcatacttgcattagttagatatggccaacacataatagtaggttaaatttaggcatcctactttacttattacaatattaaggaactatcgagaagcagaaagccgagtgctgcattatatctattcataccggcccaagacagcaacaattggatttgcgcttcgaattgtgtattacatccatccctagcatatttcaagttgattagccaaaatcaccattgaagtttcctcaaattttgctacatggctttctttagctgtgacactcgtcggtcttggtcctatcgctactcggttcggcaccattgtcgaccggacagatcaattccatgacctacgagacatgctgcctttaggcagccggtggcgccgacaaccatatataccatggtaccatattgtcaaacccccccccctgttgggcccttatgagcgcaaacctcttgcatgggctctgcgggaacaatatggtatatgtcagtggttcaccatcatcatcacaccaagttggccaagcagcatggtcggtgttatttgcagttattcaccgaggctctcatatcaataaataacacaaattatcagagaagctctcaacacatgataccatgggatttgaccatatagtcacaattaccaacgaatcttaccagatcccaccaagtgaaagctgggctgatatgcctcttcgtcctcttacgagacaaaaattgactacttgtactgtgatttcacgtacaacactcatggcattgttctgtaataacaaatgcgcggcgggtattttgttatagcagcgcttctggtcatcgagctgcctatgcatcctactgcggacaatggcgcgtggaatggcccattggagaccttgcacgggttcacttttgtgcgtatgacctgcacacgttatcaaaggacccatatccggcaagattccagcaaagagtcgataagtgcttacagatactggctggggtgattgaatcgcactcatcaaatacattgaagtgtgcttttccggcacgcaaatcagccggtaaatggattcttgaatatacacctaaaggattcggcggtgcgcatggcggaagacatctttacaacatgctcggcggcaaagtgagcgaggtcgacttcttgcccatgaaagtgatacacacagaaatagaagcatcaaaggacatggtggttcttcacttgcctagcaaagattccgatgtgcgtgatgtgattttatacgtctcaaggcaagaatcggccattttcaatgaagccgtggataaacttccttggacatttctgtcatggtcaattcatcgagggctgtgtgatatcctagttgcttttgcaagggaaaggatggaccactatagaaaccgtttagcagagacattctgtcttgcggtagcaaaatggccagaaagattggaagccaggggatgggacccgcggtttgtgagagaagatattgcagccatggcagcaagccctgttacgggcaagccctgttacggcgggccaggggaattcaggagatgtcgtcaggattgtgactgaaatagcagcgactttatctggtggaccaatttcagcacttgatgagacgaggttttggagggacgcaggtcccacatctgattctccaatccttgacccgatgaccgtcatcgctcttgtcaagtgtttcgtcttagagtggagtgtgaacttgaactaccagatgtaccacgattttcctctagagatgtacctaggatgaacaaataagaactgttcgaaaacttaacattttgttaagtgactcattgaacagtgccttcgtcctcggtcattccgcacaacgatcccactttactcttcactaatgctagcatgagccattacaagtacatcttccttggtactgtcaatccgcatacagactttgcccatttgaagcgcgctaccaattcccaaaaatgcattcgtgcgggtggaaagcacaacgacctcgacgacgtgggaaaggataactatcaccacaccttctttgaaatgctaggtaactggtccttcggtgactacttcaaacaggaagccgctgagtactcgtgggagctgctcacacgcgtgtttggtcttgaccccagcagactctgtatcacctatttcgaaggttacgcccccctagggcttggcccggacattgatgctcaagagatctggcgtgctattggcggacccgatgaccatatcatcctaggaaacatgaaagataatttctgggagatgggcagccagggaccgtgtggaccctgcagtgaggtccactatgatagagttggtggatgaaatgccgcttatctggtcaaccaagatgaccccgacgtcgtggagatctggaatattgttttcattcaattcaacagggaggcagacatgtctttgagatcattaccgaacaagcatatcgacatcgggttgggttcgagcgcctggtctccatcgtacaaggcaagtcatcgaattatgacacagacctcttctcccctctctttgaaaagatacaagaaatcacaggagctcgtccataccaaggaaagtttggcgccgaagatgatggcattgacaccgcctaccgtgttgtggccgaccatgtccgcacatgcacggttacgttgtacggagaaccttacgacgtggtgtgcgatacgcgaaagtcggttctttcttctcgaagattgtgcttacagttgtcgaacagatcggggatatcttccctgaagtcagaaggaatgaacagaccgtgaaggagatcctcgactaagaggaagaagcttttgctttaactatagaccgaggagaagcgacgtttggcaaatatgcgcagaagtgtcatgagagtggttcaaaggacctccccggagcttacgtgtggctactatatcacacatatgggttcccggttgacttgacaaagcttatggccgaagagtaaggtctgaatattgacgaggacgaagtgtccgccgcccaagagatggcccgagaggttagcaaaggcgaaaagaagagtgcatctgatctcgtcacgctcgacattcacgatctcgctgctctagagtataaagttggcatgtgtaaaccagatgatgtggctaagtataggaaaggttccatcagcaatctcaattttggacaagaaactgttcgcaaggcgactcgaaggaagcatcaaagagatgatgaaagagcaaaaagaaacgcagagaagtcaagtcgatgctgccatcaaccatgtcaaaaccgtcatcgatgataacccagccagcacctcgtttgttgttaacctcccgactgattgttccgccaaagttaccacggaggccattaagtatgtctcttctatccacgacgacaagagcgtgtatttcataggtgtaggtgccactggcagggttgcccaggggtgctttgtctcaccggtaagtttgtttcaaggaatagaatgagctgttttaacctatattactagaaacacacctcgaataggctggtggcaaatgaatgggctgcacaggttgcgaaagtcgtgggtggaaaggctggtggaaagggtcttacaagtatggggagcggaccggataaggccaaagtggaggatgggatggtggctgcgagaatgtatctccaagaactgcagatttgatcatctgagaagatccggaatagaatgcatacactgtggattgaaggagaaacaatccggccatatccaaggcagataactcgaaacctacacaaatcagcctcaagagttacaagtggagattaattgtgccaaccagccaatagaaaggaccaatttcaaatttccaagtgattcagtcgcttaatcgggactttaagggtcctaatgaaatgaggtctcacttaaaaatagggtcctaaaaaagtcagggggagaagaatatcgtgatggacatctcaatctctcagcatcaccctaaccaatcccacggcatttcccggattgatagagtggtgtattattccctctctggaacccatttctacttctacaccgtcacaccgtcaccatgcgtgctcaggggcggacattcacaaaattctcaaccgcaagcatactgatcctatcatgtctcttcttcatcctctattaccaccccctgagagaagcaacaccagaaagctaccctacatatgatccatctagaaagggattccagctggcgtcgccgcggatcccagagaagatctggtacaaagttggacctaaaggattgagcgaccagtcagaggaatggctgcacgattgtctccacaaaaacccagcgcatagcgcgcagatcatgaccgacctcacgggcgatcaatatgtgcaagagaacttcggcgatcgtcccgatatcgtcgatgcctacctttctctctcggtaccgattctgaaggcggatttcctgcgctatctgcttctcttcgtcgaagggggcatctgggctgatctggatgtctcgtgtggggatgtacccattagagaatggattcccgagactatgcgtgctaaagctcggctggttgttgggtgggagtttgatgtgggctggggggagaatttcatccggcagtttgagagttggacgattatggcggcgcctggatcgccgcatctgttcatggttatcaatgatattatggagggcattcgtcagaagacggaggagtatcaggttccggtttccgggttgactttggatatgacgggtaatgtgatcgactttaccgggccgaggcgactgactcgcggggttttgaagagcttggaattggctcgcaatgagacgatcgatatggcgagtatctcgaatcttttggagcccgttttgctcgatgatgttttgatcttgccggggtattcgttcgctgcgtcgtcgaattcttacagcaatgtgaatgtgactggtccttcattggtccagcatcattatgccggcagttggaagaatcacaatggtggtgagatctgaccatggatatgacttcatgtacattggattttgtatagagccatgtgatttataaggcagttgggtcttagaccgttagaagagttcacgaaatttcatgtaattattttcccattttttgaacagctagatttatcagcactatggtagtacacgaggcacagatttcccaggattccaccggacagttccgtgaagaagaacgatatcgtcagtcataaggtatcgggaactttttgtgagaaaaaaaaaaaagttgaagagaaaagatcaaatcgcaaatattggtggaaatcccggacgccacgctgaagtaacaaaaaatcgaacgaaacatggagtcctgattcgaggaagatagatagtgtcaaattcactcctcgtcggtctcggtggcatcctcgccgtcttcatcatcggactcgtcaactccgctgtctgactcgtttcccccgtcgagacctggaataccgcgccactcgacgtagtcaccttccaaccagcgacggctacggggaagctggtagggatcgaaggggaagtatgcatccagttgatagccgagatgatcgccggcgcggatctcgcggccgacatggttgaagcgaggatctgagagattggaaatgctcctgaaggcagtaacgcgaatgcgcttgttggtctcaaggagagggtagacgtataggaattggaagtggtgggcgatacgggcgaattcggcgacgatggccggcgagcataccttgagcgggttcaatcgcgaatagatgcatttgtgaaggaattctttgatgttgggaggaaatgtgatctggcccggctcaagctcgtccacctgagccgcagtatcaccatcgacggcagcggtagtcagatcgcgccaccggaaacagaaaatgtacagcagagcctgggcggtggagtagaaaggtccgtagcgacgaagatcgggcccgcggcagctgtcctcatagtccatacgtaggctgttgaggtgtgtgaggaggagatcgaagacgtcgcgaacaacttctcccgagatatgggcaccacgggcaacaaagctggccaggtatgcggctgctgactggcgcaggatattgggctgcagcttgttgaagatgagctgtacaaatgtggctgcgaagcgatccacgagcacgggcgaagcctgggagaaatggaacaagaggaattgcgagtgacgggatcggtatgtagggaggatgatcgtctggaagtgactgaggagcaggtctagcgcattctccttatcatccagggtgcccgaggtgaacgggggtgagaagtattcgaagaggatgtcaatcatcccgtccactttgagaatgttatccttgatcttcttaggccccttcatgtcgtcctcttccgaatcttcgctggaaaccgaggcatcatcatcgtcatccgaatcatcaatctcatgcaaaaattcatcgccgacttcctcttcaaagtcctccatatcaacctgaatttcaacgtcgaccttgacaagcttctcggtaataagcgccaggatgtcggactgaagctctggggcgtaagtaatgatgtggatgagattgcgggtataggcaatgttcgcgctagctgggtctgtgtcgaagggaaactgggcagacaaaatcggggagagtgacccactaccggccgggatgagccgcagcacatggcgcattgccatgtggactcgagtatgcatttcggatggtgtcacgacagcgtagccagggagtcgaccgcgtcttcgagggatggacccgagatttgtggctaacatcttcaagacgggaccaaggaaggtaccctgtgcggcggcaaggttgcccaggaaccggatatacagcttcacgtaggattcgtcccgtccgagccactcgctgttgatgatggcatggaccagtccgctgcaggagcggtccaaggaggcaacatgcgagatcagaccaagaaggtggtttttcaaagatgtgtgtgttggtgattcatatgcaagcaggctgtcatcgtcttgctttgttggatcggcagaaaacattcccttgattcggtcgtagccctcgctttctgacatcgtaacatgtcggtggatagcccggcgcatctcctctcgaatgaatgtcagactcttctccgacgatgtatcctcatatatcttcacatcttgatcgaactgtacgcggggtcgcttcttggtaggaggaagggcttctgtcgcgtcatcggcctgggatgaggacggggatagggggaggtccatctcgctaattttgcgtttcgagccggcgaccacaggaggagccttcgagtttttgagaatcgggactggagaagaagccggaagcattttagatcgagatatcgtgggtgtggccagtagcgccggtttgcgtgaagtcgtggctagggagaccatggccgaaggtgcggaagaagagatgtaggacaggttctaggcagaaaccggtgtcgacatttgcttttctgcactctggcagaaatcgaatccagttgactttcaattcaacggagcttatcgaagactgatccaagcacacgacacttttcacgtcgagatcttgaggattatgctacagattggaataggagaaaaaggcaacagtctgtctgcatccgtgggagtccagttgtttgagatagataaaatcggatgcagacagaatggtcgagttgctggattccaagcaaagcaaagtgaaatttttccttttccttcggtcacttgtggagcccggcggacacccgtgaccgtgtcggtgagccctacgctatacctaattgggtaatattgacttatgtcatcatgtactcattgtcgggatgtagaactacatcgtcacatcttactttgttcgacttggaaggtagttttgaacgtgtttattggatcatatttgagattcggaacgagacatcacataagactcccaaaaagtccctgaaagaccgcagaaccatcatcaagtacggtatgaagcagttgaacccaaatgatacatcaatgcataacgataaaaagaccgtctaatacgggaagaagtaaaaaaatggcatgaatcaattcaaaaaatcaagattgagcgcaggaacacaaggtcctcccatggtatcgtgtaaaacaaggggcaatagtcgtaaaagaaagaataagagttggtcgtcttggcgggtcaagcgaaggaatatccagtcccttgcaagtccgcaatctcgtgtcgttgatcaccccggatcaaccgggggcgcagcaattacgttagaaccaagatgtggtcataggcccacgtgtgtcctcgaaaatgctgccgtacagttcttcaacttccacaagataatcttcgacggagaacttcttgagccccttggcatagaggatccgctcctcgtcatcgtgcatattaaggccacaaaaatcctctacgacctcgttcacctgctctagctctttgccgaatggatgcggctcggcctggaagaattcctgtgatgcacgaatggtcggtgtggtgcgcgctgcattcagcggcggcggggacatcctcgagactgagcgcttgtgagcgagctcctggtgtgaccgcttggtgtgggacagagctcgcttaggcaccatcggagcatctgtatttgacgaagacgtggaggagcgcgggtggcttgtcaccgaggccgtatgcttcgggaaatacgacgccaatgggtttgcatcaatgggagagctcccatgaggggagacatcgggcgaggacaccgaagacgcgtagctttgcggagaaaatgcgttgtcggagtcgtcgcgcgatcctagtgacgaagcagatgaagagccggcagagtaacctgggctgatatcgggtgcgttgtaggccagcatgttggtcgtagacaagagctgcaccggtccagatatgttgctgcgctttatacttgccgagttgagtcgcagattcccttcgccacgatacggcatgggtgcagacacctctgggcgcttattgcgccgggtgaatgctctcgtgagggttgacatgatttgtaaatttggtcaagtttaaaatatggcaacggtgcgtttcagcgtggttgtaaattgatttagaattttacacatgcaatgtgtgcgacttcgttcgtttttggagtctggtcgctctttgcgatcggatgcgttgagtctcgcgtggtgagacgatcgcggaaagaatgtcagatcaactggaatgtccagtatcagatcgaagtgtgtgtagaatttcgaattctagttcacagtagaaaatgaatgtcgggtcctcttgatttcgcacagcaaaatgtagagaataacagccttaaggaatgtgtttgaaataaaaaaatcaaaggagtccaggatctcagatcgctttgtatctaggacttaaagaataaaagaataaggagagaatgaaggaacaaggacacaatcccaaggaggttggaagaagaaagagagggggtttcctccttacgggggattatgggcgctacaccagcgtttgaccaaatttcacctggaccagtcgcaggacacccaaaggatgctgatggagcccaatcaaagagttcggtctagaatatttggcttctcagggcccagttgttcttgacgatcagactggttcatccagacttttgatcgtttgcctcattctacggtatacgaactacgcctaatattggttgaccttgaagggggcactccgtacaggtacttccgaacccccgagttggttccagccccatcttccagggctatcttccagggtcggatatgtgcctgggtatggagggcgtacgtgttcaacgtgttcgtgttcgacgtgtccacgggtcctgtgctggccctgagttgatatgaacaacctccctagagcatgacacatacagcgggatgcgacaatatcccgagaataatataattgaaacggatgcaggtccgaattcttagtctgaaggcacgggcgtttcaccaaccacttgtatcagttctatgctcaaagaagtctgtgctccgtgacccatttggcttgaatttggcccggtagacgtccaatcagaggggttggctggatgaactcaggtcaaggggtcttagtgcagcgcttgcctgcagctgaccgagtccggagggtttggagaacttccaaatcacagagatggtgtgctcgttctctaagtgactggtggatgtggagtattggtgtttaaagtccttcatctcagactccaccgtgaaaaatgtgtggagtggagtgagccccgctagggccttatcatgtcatatggtatgcgaggtactgcatgtcgtgtagtgctgtgaaccttggaattgcgccttgatcatgtattgctttcactcgacaaggccattctggtattttgcgtccttgaaaggttccaaacaacacgtgatgtggtgacacacaaccatagctccgcaatcgcttggcccgttacagataagccgctcaggctctataaggaaggagcagaagcttcaatagtattgtgttgcgtttagaacacatcaatttaaaagtaaagtctcgggttattgtgtgacagctcctccgctttgctcgaccctgcagatgcattggcatccaccgagatacccacagcatcctcgacgctagttattccgtctcgggaactacctggagatggcattattgattcaggccccaccgcgacttggtctccaaaatatgcctgcgaagctatcaccccagggtggggctgatgagcatcgtacgaactcaccgaactgaccctgttgtccttttgccatgcgtatgaaactagtccggaatgaggctgatctcccgagggctgtgatttatcatggctaggagtcataggaaccgcgtagccacgtcccggtgtgtctgaaacgacgtcacttgattgctcaatggtaaaacggtccgacatgaccgtcagccaacgctccatatcgggcgattctcggaggggaagctgagaccactctttcatgcgagctgccttgtgcttgagcaaagtatccgtctttggggtttgaatcactattggttgccccattgaacgcatggccatcaaagctccgtaaagggccgactcggtctctgccagcctctcttccaattggttcaagtatcccaacggtaagcccctgggccaatgagttagcttcccgggtacctgcatacatgtaggccgggtacttgccttttaccactctcagggtagatgcatttcgatacatctcctgcgcattgggaacagaacggacttaacgagatacaagtaattagaaatgagactggctagagaactaaacggtgagagctttggtcttacagtttgcggtcacactatatggtcagcacttatcttgctgtactttatgaataacatactttgcatttgcgctgtctgcatagctcacaggaaatcggattcaagttctcttctgatgagatctagagtcagtcgatctatgcttcttatctggggtattccggtcacacctggcatggtggcatcaggggccttccgcttcgatcgcaattgcgccatttgttaatcccgggattatgcaatgcccatgtagagcccccgaacatactaatgcaagatcaggctatcaaggtcgggtgtactccgtatgtatgttgctgttgggtgaaagtctcggagtaagaaacctccgggtaggattagcaggcacgtgatgatcaccatattcatcaggaagacaactaatacaacagttgttaaggggcgtgcggagcattgattttgcttctgttttgaatgaacgaattctatcatcgtgttgttcaaaatccctgcaaattggtcgtcataacgcatccgattgttggtcttattgacttgattattccatcccttccttttttattgcaatttattaccagccttccttcagtctcttggctacctaaatatggcttgatgcataatttttttctcattctgtctcacgataagcttagcttgctcaaatgcatacgcacaggcaagaattcttcgctaagcctgcgtccagtaagggtaatgccatatctattgccaataccagtaaacagatactcggtatgttaaaggcagcttacagaatattggtggctttcatgaccattcccttaaatttcctgacgatttcacgatcagcagagaacccaagtggtacctggatgccttgtagtcttccaaggtcaaggggaaggtccgtggaagaagttacgagaagaacatcacaactatagttttgtgaaagacgcgtgttgccatggcctaggtgctccattcgtgccttcaaggagaggaattcctcagatctagacgtcccttgtgcatcacgcgcatagtgcactcataattgagaatgtagctttaaattgttcgactcgtaggagtgagatagcactatctagggtgtatcctctgtgctcgataggggatggcgatgaagcagttaatataaaaaaaatattgttcaatcaatcttcaattcttcgattttatagatctggtgcagcccgctgctgacgtaataacgaactgggcgccagccctggagacttctcccaaaacttgacttcaatatctcatccaaaaaatgtgatacacaaactacagcaataatggcttcggcttcacctgcgagtatgagattcgaggacaatgaggctgaatggccatatttttctcgtgcaactaagagacacaagcgcacatcaggcgcgggtacctcagggccctcgcctcgcgagattggatttatgagagaatctcaaaatgacggatctgcgaccttccttggaagctcaagtggaatccattttatccgccatgtctacaatgccttcgcacgtcgttcagcggacttggaccaaacgcgagcccgtgacaaaacctcggtgccaggggaagacgaccggctacagcaaaatccaggaagcattcagagctcggatgagctgtgggcgatagaagaattaaattttgtgcccaatgcctcattttctttcgacgatcttgtcatgtggacacgcagctatttcgaaaattggcatccaatcttcccatgcctccacgccccgactgtcttgaaaactatagagacagtcagtcaaaaaggagcggagtcggtcaaccgattggaattgatgattctccgctccatcgtatccatttctctgggtgacaatcgacagagaacgtcgtctgaatcgaagcttagccccgttccttcggtcttggtctttcgatccattcaacatgtgatgcaagatgtacaaagcctccttgaagagccgactagcttgccactgctacaagctgcatttaccgctcaacttgcacttgcttctcttttgcgcctgaatgcggcctcgcgggtggggggtgtcatcacccgcactgcattccacctcgggttgcatcgttgcccaagacgcttttcttgctttaccagcgaagaagccgatattcgttgtcgattgttctggtccatctattcccttgaaagatatctttctcaggcccttggcattccgctctctattcgagatgacgacatcgacgtgtgctatcccgatgccgaaagacattcttcaacaactgtcaagctcccagatggccacagactgcggttgttgtgccatcttgcgagattcgcacggattcgaggtttgattgttgaacttcgtaataaatccattctccatagtcatgctagccaggtcgaagcggctcatgttactggagagctagcacaatggtggaatgaagtttatgatgatgtcaatcccatcaatgagcccgcagaatttggtctagagcaagagccgatcttgcagccatatcatcggctactcctgatgatcctaagacacgaagctgtcatttcgctgaaccgacctcttttagcctctgaaaagcccagtgcagattacaagaacgctttgcagacttgcattggatcctctcggtctatacttgcggcattgagaaagcacatgtcttttgaacccaaatctccgctctcgtggccatgctttacatggtcgacttggatggcctgtcttattctgatgtatgctgcgtgggaagaggaattatctacgccgactgctctcaaatatgcgagaatggggattgccatcttggaaaacctatcattgcgcggtagcagctggccggagacctgcatcgaggcgatcaagggtatggaatctgcttttgagacacaaacaaatggtggtcaatccgccaaggctgctgccaccttgaacggcgccgagagaccaactcaaccctgtgcccaagccacgtcatcgatggatgaacagatagcaacgctgccggttcgggatggaaataatgaggttggcgatacagatctcacgccagttcgacctcaagctttagcaccgaatggataccaaggccgttcagtctctaccggaattcatccgtttcaaccatcaattcgctcacctgtccagagacttgacactgcagaaaactacgactctactgttttctcacagtctgacaatatcggtaaccttgacggagggttagaccctgctgagaacgatttcaacggacaatattcagctggtctcattttcggcaacatggctgacggaaaccctgctttcaatccgagttttgctggtcaagactctttgccattttcatcatctatgcttttgaacgatttatggagtgtggccgatggcccatggatgattcacaataactttttgtgatttccgatattttcataagcgagcatatgcgtagatctcgtaccttagggcaatttcaatgtgattaaggattgaaatttgtttcgagcaatgaatctggaggccatctacaggccatctctcgaccaagttgttcgtcaagcggacatgtctttctccgagtggggccgtatagcacatcccggacattcgcatctccgtccgcaccccgcgacaattatagtcgaatgagctcgcgatgaggggctacgcgataggtttatgggcagtttgcaggtggagactgaaatccgggaatttggtgccgacttcctttaaaggcttcgtcttctgccgtttatcacctaaatcacctccaacaagaacttatttatcataacatcatgtctccaccagtcgctagtcaaaagacctacagcatcgcatccatcccagccgatggaattggcccagaggttatcagtgctggtatcacagctctgaatgccttgaccgatactctcaagacgttcaagttggagttcaagaactatgattggagctccgagacgtacaagaagaccggcaaatacatccccgatggtggactcgaggagctcaagaagcacgacgcgattttcttcggcgccgtcggcgctcctggtaagcagacacaatcaatgccttggagacattatactaaacaccagagaagacgtcccggatcatatttccttgtggggactgagactcgccatctgccagccgttccagcagtatgcgaacgtgcgcccaacacgggtattccgcggcaccgagtccccgttgcgcaagtgcggacccaatgaccttgactgggttatcatccgtgagaacagcgagggagagtatgcgggtcagggtggccgttctcacaccggaaaaccgtgggaggtcgcgactgaagtttctatcttctcccgtcacggtgtggagaggattatgcggtttgcctttgagactgctcagaagcggccgcgcaagctgttgacggtggtcactaagagcaatgcccagcgcaacggtatggttctctgggatgaagtggcaaagattgttgcggttgatttccccgatgtcactgtggacaagatgcttgttgatgctatgactactcgcatggttctgaagcccgagagtctggataccatcgttgctaccaatttggtgagttgccgatatagaatgaggcatcaataggtctgtggactaacgatcaactagcacgctgatatcctctctgatctcgctgcctctctggctggatctattggtatcgcacctacctctaacctcgaccctacacgggagtatcctagtatgttcgagcccattcacggctccgcttttgatatcactggcatgggtatctccaaccccgtggctacgttctggacggcttcggagatgcttgcttggctcggcgaggaggaggctgctaagcagctgctggtctgtgtcgaaaatgtctgcgagcagggagttcttacccgtgatttgggtggtgacgccacgacgaagcaggtcactgatgcagttgtggcggagattaagaagcttgcggctcaataagtcgtgtccaatcacgaaattttgtttggggatgagcaatgaaattgtatagttgaataaaatgagtgggcaatacattgagacctagaagcggctacaatgatgaaaatggaaaatgcagaatgaggtgaaagattcaattcctataaaatgccttttgtatatataccccgtaacatttaagaggatacctcgcacttccgtgtatcctacaagggaaaccttcgatatatataatttgagtgtttgttgtgatcaccgatctcgaccgccttttaacctccatcaactcaaccatcactctcatagaaacatttgaatggagcgcccgtccaaaagagccaaaatcttatcagattccgatgatggctcagcgagtacagccttgacgtctttgcaaaggaccattagcccaccattgccacgaggctgccccgaactgactgatgggaaattgacttctgacactggagacactggaggcactgctcgccctcccaagttggtcaattcgccagtacaacttacccatattcgagatctaccggatggtaacaatgtcgacaccatccgactacgtgatattctcggagatcccatgattcgcgaatgctggcagttcaattacctctttgatgtggattttctcatgtcgcagctcgacgaggatgtccgcagtctggtacaagtcaaggttgtgcatggatcgtggcgaagggaggatacgaatcggattcgaattgaagtaagtttgcactgacgtgacttgatcgggttggctttgtcttttgaatacgtctcaccattgatcgagggtttgaagtgacgactaatctgcttctaggaggcctgttcgcgatatcctaatgttgagcctattgtggcctacatgccggagcctttcgggacacatcattccaagatgatgattcttcttcggcatgatgacctagctcagtaagattcttgcatacatttttgatcgctatagcccgatataggtctgactgaattaccaaacagagttatcattcacacggcaaacatgatccatatggattggactaatatgacacaagccgcctggcgctccccattgcttcccctgcagaagacaagctcagcaggatctcagacagacaccaaaattggctcgggcgcacggttcaaaagggatctcctcacttatctgaaagcgtatggacctaaaaagaccggcccgctggtccagcagttggatagctacgacttcggctctattcgcgccgccctcattgctagtgttccgtccaaaaagcacgtcagtgactccagctcagaagaggatacactatggggctggcctgctctgaaagacttaatgagccagatacccatccagcagaaaaacacaggcaagaaaccacacatagtaatccaggtgcgtatctccacaaaatcatcatgctgtaataaatctccaacatatccaagatctcttcagtagcaaccctcggccaaacaaacaaatggctcaaagacgtgttcttcaaagccctcaccccaacccaaacccccaaaccaacaacctactcaataatcttcccaaccccagacgaaatccgccgctccttagacggttacaactccggcggctcaatccacatgaaaacccaaagcgcaacacaacaaaagcaactccaatacatgcgtccgcatctctgccaatgggcaggtgacaccctcgccccaggccaatgcgtcgatctatccgaagacaatcccccaacgcgcgaagcaggccgcgcccgcgcagccccgcacatcaagacttacatccgctttggggactcggacatgaagaccatcgactgggcgatggtgtcatcggcgaatctgtctacgcaggcgtggggcgcggcgacgaatgcgagtggcgaggtgcgcatttgtagctgggagattggcgttgttatttggccggatcttttccgagatgggggttgtggcgatgctgcatctgcatctgaatcccgagcggaagagaaatccccgatgtcagacacgctgatggttccttgctttaggcgagattgtccttctgtgtctgagggcgccgagacggcttcggtggtcgtcgggttccggatgccttatgatctgccattgacgccgtatggtgcgggtgatgagccgtggtgcgcgactgcttcgcatgctctaccggactggcgaggggagagttggattgcttgagtccgctgtctttgcatttagtcttcttagctatattttggtgcattttcgtctcagcagttcacgggtgtgaggcgcatggttgtcgtagtatacagtgggcgggattgtgaggtactgatactgagtcatggaaagtagcatgcatttgtattcgtattcgtcctgaaaggtttgagacaatacgattatcttttctctttagataaccgtctttccaaattcactccacaacatatctccgatagatcgcgagtcattgtcccagactaattcttccaattgtatcatctattcgtcgcgggtgccgtacttggaaatgagggtgttgacgtggctgatgtagagttggtgggccttagcagggctgtaatccttgaccttctcccaagcaccgtagagctgcttcttctataaggttgcaaagagtgaattgtcagctattggccttctcccaaacgtgctatagtccggggcttcccgagctcaatcaaaagcagagcttagacgtacctggatatcgaacatgccaggcttctccataacgtcacccttgccaaccttgaagtagatgtagaggtccttcttctccagaagaccgggggaggtcttcagcatcataacagccttggcggcgaactcgaaggccttgcggagggtctcggcctcggcggcatcatcgagcttctcgaactcgccttggtcggcgaccttctcgtagacttccttcagggctgcgatgtcgatgccggcggcagcttcttggacctcgggggtgaacttttctttcttctgggcagcctccagggcggtgatgaagggggtgatgtcggacattttgggtttgaggattgtttgtttttgggtataaggaggggtaaagtcaggaacagaggatttatatggttgggatgttggagatggttgagggcggggtcaacggccctggaggtggggtggatgacacactcgccagttgattttgaggtcatacgacctcttgcatacaatgcctttactattacgtaggctatggaatgagaaggatagctttagagtaatccaggtttgtcttaacatattcaacatttggttcagaaattccattattgaccacgccgacagatgcatatccacaatgcaaccgctgtggaatcattcgctatgcaccagaaaaagataacaaaagagaaatgtccgggcaatgtacaagttcaaagatgaagagcgatcaccaatccaccgcccatccattgtgggtgaggaattcctcacaaactgccttgagggcatagttgttccgcagatcattgacactgataggagcccgagtcaaaggatcgacgcccgacttctcgacatacttggtgatgcccaagcgatcgaaactgaccccggacggtgtaatgacaggatcatgcatgatctcaaatgtgatgccatcaatgagatagtccggaacaacctggaagcaaacccaaacgtcaacaaccacctcatcgaagaaccaagttcaaaacctaccctttcctgaacctctcccttggaagcaactcgaaatgcctccctcaaatgcctaactttagtctccgcatcctcccgcagcgccttctggtcctccccgaacccaatctccccaatctccccgcgctccaagcgaccctgcaactccgccagcgcccgcgtcacatcggcctcaatgagcgcctccatagaacccagtgtctcattcagctggcgcacccgggaagtctcccgcgcagcccagatctgctgcttcgcgcgcaggaccgtctgcgacagattctctgattgggcattcttcgctgctagactctgttggtaagcttcggacgcgacgtcgagtgcttcttgtgggcgctggaggcctaggagtgcctgtgcgaggtagtagtagctcttgagcgcgacggggttcttgagaccgtagatctcgattgcggctcgcgcgtcatgttcaacgtcggcccatttggcaagtttgcttcgtgttatcgcgcggtttgtgaagaaggttgggtcactggggttcttttggattctgtttaatgaggggattttgttagtttggggacatttgaatgatcgttgggtttgcgactttggttgggagtgaggggaagtgttggaggggttaaatgtgatagcttacgcctgggagtacaagtcttcggcaccgctgtaatccccagatttgtagagctcattgccctttgctttgagttcttgggccatgatctatgtgtgagtgaggccttgagtttctccccgtgtgatctgttccccaatgtggggcggtccccatataaattcaagagtgatcggagtggatattgctgtgattcatgacagctgggggatttaaagggtcttggatctgcagtaactatgtaagtacccttttgaatatctttgtgagttcacccaaagcgcatgaaacaactgtcactatagttggttatggtctatggaaagtcatagatccccgcagaaggtctgagtcagctcaattgatgcactgcgccacatgaggtagctactattctatacgttaatctggatgaggttgactatacttattcattcactatatacatatctctgtgaccttctaatctgatttggaagcagaagtaacattcggttcgtggtatcatacgctgtgagaactaagaaagacacaacaatcctgcagacaagtcagtgcaatctgacaagtcatgctttgtcaaagatggcacaagactagaaggattcccaagacatccggagtgtttcgggtatcaggtaagacgagacaaacagcaaagacgtgtctaagcagcagtatggaactggatctcatagtccgtgatagcttggaccttggcagcagaggcggacttagggtcgaagcggtagtttagccagtcggtagccagcttcttggctaattcaacaccgatgacacgctgtcccatgcataggacttgagcgtcgttgctcaggatggagcgctcaacggagaaaggatcgtgggcagtcacagcccgaatgccgggcaccttgttcgcggcgatggcaacacccagaccagttccgcaaatgaagaggccacgatcagccttgccatccatgatgagcttggcaccctcgacggcagggtgtgggtaggcagtcttgtcggaggatgagttgacacccacatcaatgatctcggcgacgagagggttcttctcgagagtggccttgatagcatccttatatgggacaccggcctcatcgcaggccatgacgatgcggaaaggagtagacatgatgaggaccgaggtatggacgagaggatgaagaatgtacaaacaatacgagatgtattgaatcaaatatatggtagagataaatagattgatttcacacagaaaagaaatccttgacttgggagtacaacaaggggtctttatatctttttgcttagctctcttcccctctctcctttatagccgtacaaccaccgctcaggtccagccaatccttgcatttgatagaatcacctacagccgttctccaccaagagactcgaatagtctggttccggccttgatattgttacgcgtatttcagcgtccagggtggcccgccccagcatcatagcaccccacgacgggccgtgagtggtcggtgccagaaagaggttaaaccgaggtcggatactttaggatccttgttttggtccgtacatgcgtcttacctcgtattaccggcatgttttattagacctcgctggcgctggcttggaacacacaggcttcacattctgccacacaccaagccatcgatgttagtggtgagcgcaacctacaatacacgactgacaagaaggttgtggcttttcgcacaggcatggcggtccaactggcttcttaaatgctgatgcctcaaggccgagggccgggacctttggtttcatcttttcccgagtccagggttattttggtggctaaggtctgggcacctcgtatatcgacgaatacatggctatggccccggccgatgtcacctagacgggaagaggggaatattgaattgacctcataccagggaattaggttcaatgctttgaaaacctggctgagcatgacattggagggtaatgcgggatatcgacgagtgaatttgcctcctgacttagtcttccaatggtcgaatgcacaagtacacaagtacggccttattatccccaagacgctaaaccccataattgatgtgcattgcctcatagcaaaggtgttttactccactttaccactccactgcaatgttgttggtcgttagcccaccggttctccggcttgtactattgtacaatgtatgttctccggattttcgtttggatctgcactgtatgatcctagaacttgcatcctaattatactatagtaggcagatgggatgaaggagtcttggtatgtatgtctaaagtgtacatacgtccaaagcgcaataccatctgggaatagtttgattctcctatgtccggggtacggggtactagatattacgttggcttcgcttggcctatcacagtctagccaacaattattggattcggtattgagtactctattgagtactctgaatggctatagcccgggcccatgtgacatcacgcactccgtaccctcatacaacataacgtgtactccgtatggacaatcggaacgtctagcgcataaatgccactaatgcgcattgacacactggaaattacctttgatcaaataaatacttggaaatacttggaattacaattcgaaccctggctttgactttccaactttccgagaatcaagaatccctagcctcagacgggaacggtcccccctccataacacccaaacacacaactttcgcaacaccaatcaccatggcgtccacttacccagttctcccggagaagctcctcctcatctctctaaagatgtacttcaccccagaccgcacactcacctaccttcgcgaactcctcaacccaaccaacgagatcgtccaccccgcaaaccgagacaaactcctcctagctctaatcccagacttcctaaccatctggccctgcgcgcaaatcctcaaagagtacgaagccaacctcaccagcaccggaaccggaacctccccatccccaccccccttcctcctcggcgcgcaagactgcttctgggaatcgcaaggcgcatacacaggcgaagtctctccggcctcaatccgcgcgctaggctgctcaatcgtcgaactaggccacgccgagcgccgcgccatcttcaacgaaacagaagaccaaaccgcccgcaaagcagccgcaacctgcgcccagcacatggtcccgctcgtctgcatcggcgaagtgacagctcccggccccgtcgcctcccaagccgtcggccaggctgtggccgagtgtgcggtgctggtgcgcactgtgctggcggccatcccggacgacgcacccgttatatttgcttacgagcctgtttgggctattggccagccgaagccggcgggtgttgatcacgttgctgctgttgtgcagggcatccgggcggttattagtgcccggtctggtacagtgcgtgttttgtatggcggtagtgccggacctggtctttggggggctggtgggcttggtcgcgcggttgatgggatgtttttgggcaggttcgcgcatcaaattgatggcgtgcgggaggttgtccgtgaggtagaggagacgctggctatagcgtgatgatgccccaggtactcatcctcgacacgacgccttgacatttcatgtctacaattatacaggtatacggtatcgtgtttcgcactatacggttccttgtcattgttatacggaataataaataacagaccttgaagaaaaaggcgcatctagacaaaaacaggtaaagtgggaatctcaaccggctgtctccccgggaagcctatctggggaaacccgcaaactggagaacttccccggttttcttcagtcacggggccgatcagagatttccctctcagatgactttaaagctttttttaggttcggcaaacctcaataggccttggatactatgtatctctcctccactctgctttatgtgggttcattggactgatcgagtaatccgagctattgatgtagttcgcgcgggtcaattccgagcgagatcgagttccccttttcatttatttcggtattgcctgacttggtcgttccatatagaattttgcggtgtcaattggatctttcgggcgagaaatcagaaaaaatgaatgcagaatattacttttcttgtgcatatccgtgttatttacaggatctatcaaagaccgaatgagaataatcgaaaaaaaatcatagttcacaccgcttatttcttctgcagctcctcgcgcagctcctgcttgacacgcgtgacagtgccaacaccgccgtagacaataccagtgtacatcatagccaccgaagcgccggccttgagagcctcgcgtgcctcctcaccagtagtgataccgccggaagcgaagataaccttccgaggaaggccagacaccttcccgacagacttatccgaatcggtcgcagatgatgggggtccctggtcaagcagggcgcggtagcgggcgacgagcgcaatggagcggttaaacagctgggggccggagtaaccgccggtttccttcagagtcttctgctcctcggcggggaggacgaagccccggggcacggggtcgggccgacggttggtggtgttgccgacgatgacaccgtcgacgccggagttccagacagcctcgcagatgccggatatctgctcgtcggagtcttcatccgggcttaccttgaccattacgtagggcttggtcttgcgctcgacgttcttggcggaggcgacgaccgccgtgaggattgctgtgaggggtgcggctgcttggaggtcacgcagacctggggtgttggggctggagacgttcacgacgagaatgtcggcgtacggcgccactcggtccacgcagtaaacgtagtcgcgcttgatggcttcgatgtctccgtcgggggtaaccttgttcttggcaacttgcaccgcaagaagtttgcctgggacgagacttccgggcggaacgttggcttcgccgtccaagacgcgctgcgcggattgttcgtgcaggccaaatccggcggcgtaggcgaagtcagctacacgctgcttcagaacctttgccatatggtcggcgcccttggagttgaggccgtagcggttgatcatcgcgtgttgcgagggcagtcggaatactctaggcttcgggttgccttcctgtggtagaggggtcgtgccgcccacctcgacgatggcaggaccgatgtcgaacagcgcatcagggacctcggcgtgcttgtccagaccggcggagataccgatggggttagagagggtgtatccaaagacctggtaaaagacctcgtcagtgattgaccatcggcaggtttgggaataccattacctcagttgccaggacaccatcactgtccgggtcgccacgctcgcgtgggtgcagaccatattggtagagcatcttcaggttttccacgccaacgtggtgcgcatcctccgcatcgggccacaaaaggcggatcaagggtacaacgccgtatctgtggatactggctctggtgtccgttccatagatgtagcccaccagcagggttaaggccaatgaggcaccgtacaaagccttcctagagccacggcgggctttgcgggggatctccttagcggcctcctgcgtaacttcctttcccatctccttggccgcctcagtgggtggaggtgcagccgagtccgaagcatatcgcaaagcaccggggtagcgctgggcccgtttcggtagcaatgccgacggccgttggatcaagcgggaggtaggaagagcgcgagcccggacgctggctctccaggccattgttgcagagttacaagtcattttggttgcgtatagagctaattatcttcgccggagcaacgcccgatcgaacctatacagcggttagtacttgcgattgatagtggattgtggatagagctagtcaagctctaatcgacccgcattgtaaactagccggctggaacagtacgtacagataaatatgcacctaataaagcacttacaatttcaattgagcacgatccgaggttctcgcttgcagggcggattcgggttctttgctgcacagtccgggcggtgtcaataggtcctgcagaattttgagggcggtaccattacgtagcttcatcgctggatgtacttcgtcttctatgtcttcggttataatttcaataattgttagagattacaagatgcttcgaaatattttcttatccctatatttagagcaatgtctatgctttatatgcagaatgagtgaatatattaactgacgatcttcccttcaatgatcacgaggacctcgtatcgggcaacagtgctaaggcttgggaatgaccaacctaacttctgcatctcaaatgttgcgaatcctttagcttgtctctttctccgaacagaaacccttcgttcatatccacggtgctgcatgccacctgtcccagccaaaatgaggatccaaggaagaacaaccaactctccagcggggggatctggccgtgtctatttcgacgaggaggacgattcccctggtcgagaacatgcaccctcgcagcgggagtcgaatactatccccgaagcgactcctcagctcaatcttacaaaggagccctaccgttcattcaacgtcttcaaagatgtatgttagcattccggtatggatgcagctgtctctatataatccatcataattcaaacaattctcatcaattcgcacaggtaccactcggtacaaatgccttcagcttttgccttcaggtccacccttctggaggacttgctcaatctccaagcccagtatatcacaccttgcgcatcccctggtaccgccaagggctttatctgccagcttcatttgatctttactctggtggcaatgttgtgcgcagccggaaagatccatctcctgatcctaaggaccaccgtgcgcacattcactaccgtggctttgagggtctgctcggtcttcacgtgacagtagacatcttccgccaagtaggctctaacacactccaaaacgacctcccagcctctgaggagagactggatcttgtcaagcactgctcagtggatattgttcggaagggaattggtaggacttaccgtgttgagattactggtggcggcgctgtcagaacattctactggaaaggatccaagactgcattgtctctccttcaaactgaagaaaaagacgctggtcctagcgatgggaacggcaacctgaagttcttcgctgcaaataaaccagatgatattcttgcggtgtggcagaatagaaccgatcggcaaattctagggtctttgaacgttatcgccgagcttgatgctgattcggatgggatccttgaagggtcaatggtgagttgcctggcagtggttgttgcagaaagggtttccgggcgagggtgggtaggtggcctggggaagtcaaggaactcctagaaaattgttatttattgggataagtgtatctccatgtagtgaagacctaaataaaggcctaaaactcgatcaccttgtaattagcaaacaatgaacttaggtatgctgagatatcatgcgtttataaacttccatttccttgagtttcttcattctgtcaaagctatttttgttagcctctctaattaccatgtcgatccaacgaatacgctgtatttaagtagaagtgataatatgttcttcactgtcaagacagatattttagaacatcaacatatgccagcccaaagtgagctatgataccccgtacctattgggggattctcaagaccaccctgccatcaatctccgagcgctccagacggtccaaaacctcattgatatcgtccaagttaaagatgtcaatatgcgcctttacatcgccggctacggccatagccagcatctcatccatctcatccgctgttcctgcagagtttccgacaatagtaaggcctgtattaattggtcagaccggctcatgtcttgagttgcataggtattgagaactcacccttgacaatcatatcgaatggcgtagctggcagtttgaatggtttgttgggaataccaacgcagaccagcgtaccaaaaggacgcaacatctgcatactttgttcgtatgctcgctcgccattggcagtacagatcacagcatgtacaccgaatgtcgtcttgtctttgactgcctggacaatgtcgacatcgcggtagtccaggaattctgtagccccaagcgaaaggcacagttgcttcttcttatctccgctttggaagcatcgggttagcttgttgtaaatatgacacataatgttaagttgatatcacatacctgtcgattgcaatgaccttgaggcccttcttagcggcaatctgaattcccctgcaagaaatatcctcgtcagaaaaaaaaaacatttcggctatagaaatctgaattgggaatgtacatatgaccaaggccacctccagcaccaaggatggcaaggtagtctcccgggcgagtcttggtcttcatgattgaagagtacatcgcaattccagctggagacaatgattagcgtttgtattagcgaaataccaattggcaaaacattaccacatagaagaggcgcggcagtatctggcgaaagctggtccggaattttcgtcacatgaagtgctgggctgacaatatattctgaggcatggtatcagaagtgccccaatggactgggtgatggcatcgatagatagaatacttacgctggaatgttccaggtacattctgtaaaccaccaatgcaattagtaacagaaccgatggcgaaagacatagtctgtggtgatcagcaacttactgcaccagcattcttctgatacgggcatacggtatggttgacttcacaaatctcgcactggcggcaagaactgtagagccatctaatagtggaaatgcctttagcgtcaatataactccagatgagaaatttgcgacgaaggagacagacctgataccaaccctcgttcccatccattgcttctcgtcaacttccggtccgactaagggtaatgacgaatattagtatacgttctgacctatgatcagagacagtgatagttcttaccttggactactctcccaatgccttcatggcccgcaacatcagtcaacataggcgtgtcaccgcggatgctgtgaagatccgagtgacataccccagaatactcgagcttgacgaggatttcgccttctcccggagttggcaccgggcgattgctcttgatccccacctttgtggagacaggacttgtggatgagataacagcagcgatctgaattggggggattggggggaccgacatcttgctgcttctatgaatcttcgagatcgcgtattggagaaagtctgaatctcaacgaggacacttggcttaaatacttcggtagttgaaacctgattccgataggcggcattagtcgtatcgcagatgcgggggcgtgaggaaggcgcaaagataagcagaaacagttagcagatgccaagatatgatattggagatctcgagtttgggcagattaggcaggttagaccgggggtgaaggtggagatgggagatatcaacacaataatccactacaaactcggatagaatacatctgacacttcttttttacagttcagcgtcaataattcaattaaacaattatgtgtaagccgcaagtctgacatcgggacaatcatgaaggaatataagacaaggactccgctaggcagagacgaaggaaagaagtgctacagcactcatgcagcagaaggcttccgagttgcgagaactcgaacaccaaggtatcaaagatgaaattctaaacccgacatagaacgctagaaaatcatgcattctcggactggattgtttgctgcaagtaaagacatagttagtttgagaaacaagcaggttgcatcgggagagaaaccaaccactagccaatccattccctcattaatacccttgccatcaatggcagagcaagcaacaatactccagtttcggtctcgcagctctcccagcttcaaagcctctgagatctcgcctgcgcccttggcaccgggctgatcttgtttgttggcaaacaccagcaatgccgcgtcgtgaagttcctcctcattcaacatggctgctaattcatctgccgcagtccctaatcgctcaatatctgtggagtcgatgacgaagaccactgcggcggtgttggcgtagtagcatcgccagtatgggcggatagaagtttggccaccaagatcctacaatccagggatgttagttatggcccgaacgagcttaaagagggttacaacatacccagacattcagattgagattcttatatgtgacagattcgacgttgaaaccgattgtaggtatcgtagtgacgacctcaccgatctgtgggcacgaggtgtcagccccgcgaatctcacttgaacgcgccagaaaacccaagtttcaaagctataatatcttaccttgagtctgtacagcaaagtagtctttccagcgttatcctaaatacccgaaagatgttgattagtttcggtccttgtgtcactaatgagatcctgcattccccgcgtgggatgcagatgaggcacaacgtacaagtcctagaatcaggatgcgaatctcttttgtggaccagagtagggaccagatacgtgatagtgaacctcccatcgtgtgtaagattaaccagtgggcgcgttgttcactgttcggtgcacagggtgtccgggcaagtatgggccgagggtggtttaggttgaggggcgcgtaaatggtatagattgagtggaatgagacaaactcgctatggtggtatggtacaagtagttgagatagagatgaaagagaagaaaggcactgatggcagccgcattggatgttcttggccgatgggccagtgcggtgtgggcggtcaatcgggggatcatcgtcttgcgggattgagcttctcatttagaaaaccacattgtgtcttttcctctatcatattctggtcttgcttactttatcgcgttctacgcgactatccctcactatctgaagtgcaaccgggccactacaatcacctccggcgcactccctagatctgccgcgattagtttcaattgaagacagccgaccaccacccgataccaccatggttggaaagaagtcaggcaaggccctccgggatgagggtaagatagtccggtcgagctgttggaatacagccatcaagaacagagcagctgatacttgacataggcctggagcggaccgacaataacatggaactatccagctggccgcagattccggcaatcaatcagaagaactactatacgtacgtatctaggctgatgcctgccgcacggctctatttgataacatcaatactgattgcgctatgtagggactacctgaaacgagacgatcaaaatctcgcgttccgactacaaaacgaggaagcaaggacaaagatgacgaagaaagcgaaggatcacgaccgtgccctggcaatggccaagaccgagaccgagaccgcggaaggcgagggtgaggcagatggcgacgcccaaatggaggatgcggaggagaccccggccgagatggctggctctaaggttattgtcatccacatgggcagtcagaacctccgtattggacttgccagcgacgcactgccgaagaccttgccaatggtgattgcgaggaaatcggcgaccaacgagtccgaagaccatgatgaacctaagcccaagagattcaaacacgacgatggctctgaaatagagcccgaaaaagcctttggacctgaagtatgtccagtacaacttgtcgagatggccttgtactaattttttttgatagtggtcgtctcatttcaatcagatgtctgcggatttaaaggtgcacatgcgacagaacaagcgaagaatgcttccaaactccaaggagatggttgtcaactataaccgcagaaccgtgccagaaattatctctgaacacaatgatccaatgcgtgctgaatggactgagctctctaatcccccaccagagtatattgtcgggaagccggctctgcgggttccggattcttcgaaacctcgttacaagctgtattggccaatccggaatggctggtgcaacgagaaggactacacaagcaagaggtctctcttcctggatatttcattgatcgtggaggatgcgatcaagaatcaactgcgcttgacgagcaagaaggattggacccagtattcgtgtgttttcgtcatcccggatctttacgacaagtcttatgttacccaagtcttggatatgttgatgcgagagtttgcgttcgctcgggtgtgtttcatccaagaaagcctggcagccacctttggtgcaggcttcacctcgggatgtgtcgtcgatatcggagcgcagaagacttcaatctgctgtgtggaagaaggcatgtgcatcgagaactctcgagtgaaccttaagtatggcggtcaagacgtgaccgaaacgttcatcaagatgatgctgtacgatcatttcccctatgccgatatcgacctacggcgtagacatgacttccttctggccgaagagctcaaaaagaagatctgcaccatgaacgaagccagcgtttctccacaagtctttgacttccaccttcgtgtggcaggccaggatacgcgaaagtacactttcaaggcttttgacgaggttcttcttgccccaatgggtgtatttgagcctgctatttttgataactctgacaaaatcaccgggagacggaccctgatcgatcgttctgttgacatttatgatggatcacctaatgatcctacttctgcagcccagtcggagattttgaccgccatggcccctccccttccccgcggcaagacgaatggcgagtctcacttggcggtgccggatgttcaggccacaccaagccgcccccacgctttaagcaaactcgagggcacacctcgatcttctgtcgctggttctccaggaccggaaaatataggaacccctcaagcaggagggacaagcacgcccgctgccacagccgctgtagcccaagctccccgccctcctgccgtggaagatcgagatgatattatgcctgtcttcggtctggacaacgctatcctgacctccattgcccacgccgctcgctcagacgagaaaaagatgcgggatttcatcggcggtatcatggtcgtcggtggaggcagcttgactagcgggttccatctcttcttggaagagcgactgcaggctctccgccctggcttctcaaaggagatcatgatcgggacaccgcccagagatctcgatccccaggttgttgtgtggaagggagccagtattttcggcaaactaagcggtacaaacgacagttggatcggaaggttggagtatgatcgacttggtccccggctgatggcgtacaagtgcatgtgggcgtactgagcacttcgggatattcatttatggtattatgagaattcggcgtgggagttgcatgttttgtggtcactttcaaaaggaatttctatattttttctaatacaatggagtactttgaatctcgcaatcgataattagttgacctaaaagaaagagctgtgtagttgtgagctgttgtcctgaggttgggtaaatgcacgcacttatctgcttccaacactttcatctccatgatttatgtcctttcacgtgatatcttctgtatttccacgcgtatattcccacaacgcaataaacagacggtgaatccgggcagaataatggttctcaggctcagctccggggttgctctgtatggcttttgccgattcctccagttccatttttggccagtttggatagccccttctactggcgagccgaaccactggattctgatatattgccaattttgctttctaccgccgtccttgcctttctacaagcccttgactttcctcacggtaggtttgcgaccaattccctcacatccattttgaatcgagctcttatactaactggccactatagagttgcactaccattttcgctcgccaaaatcaaggcgacaacatcctaattcatcctagtccattcaagtccattccagtccattacggtaagcttccgtcccacctagtccatgcggtacgccgagttgctaatgcgcaaaatcacccagccaatcgcgtgaccaaataagacgacagtatgtcttccaaatcaaaggagggtcagtcctcagggggctttcaccaggaatacattgcgtccctccgctatcgcaatgatctccctcccccggacatgccccccaagttccttgacatcccacacgagggcttgagtcgcttcctcacccccgggtttgcctcaaacctggcacgccgtgaggagcctaacattgaagtcgatgccgaaggtggaatgccaattgatctagtcggtattccggggttacatttgggcgacgagagtggtatgtcaatgcagaatcccctatcattgcgttgctgcaactaacatatccaccagctattatggtaccagagaaccctcagcccatggatcccgctgaccttccccttctcatgactattgagcaactccgaaaccctgcccctaggaataccaatgtcagtttcctccgccgtacgcaacatatcggtgtcgaccgcagtggcggagatggatctcgccctgcacctattaaaacacaaccgcgcattgcgaagaaaggaaagcctcctgtggatgacccgaaacatgttaagaagttcattcaaaaaggattcgatatcgcctaccccaagagcaagcacgtcggagaggacactgatagccacatccgtggtcttccacccacaaaggcagaacttgatgcctgggctaatcccgtccaccctgacaacccgaagctgaagccagtcggggttttccctgtgatgcctgatctggaagggttcccagaccctggtggttaccttcaattcaagtttgataaggcgcctttaacagccgtcggaggcaagcgggataaacgtatggatgttggtattctgacaccagtcgcgcccgagcagcgtatttgccaggagcatgaatccaagctgaatcttcacctcacgaaccctgttctttacgcccacccaggcccagttccttatgactaccaactcttccttccagagaagccacagtctgttaagaacattgacgcaagcatgaacctgtccaacccgaaccgagacagcgaagacctatacaccaatgagagcgccgagggcaccaaattccaccgttatgatcgcattcgcacttacgccaccagtgctcaggtcttcaacaccgatcaaaaggacattgcattgacgctcttcaagcccaaggatggagacaccaggcaactggccgcttactactatccaatctcaggcaaggcccgtctcaagccggagcgcgcccgcacgattgctcaggccggtctcgctcccacttccacccaacaagaagagaccgaggaacggattgaccagatgcaagtagttatgcgtgatcccaacgaggctgaaatctacaagcgtgccttgacccgtctgcgcgtcgatccaaagtttgcaagcaatatgccacccgagcccgttgcccaggaggaggagcaatcgttggataacggggagacagaaaagccagccgatgaggacactcgcatgagcgatgacgaatagtcattcgcagctttctatgatgtattatggatctattttttgaacattgcaatctccaaatttctgcctaggtagtttcccatgggtctggcgtctgagcaatggaaaatggcgttacgtatagtgaatttttttactaaagtagttatacaatcaatcgtctcatacattcgcgaatctagttttgtatatttgtatgtattaggccattcatcccaagcctcaattagtacgtgtcgccttccagtcccgtaagtttacgtcaatgtgatagaataagtcatttctccaagtaatgtactcttcgcgtactaagggaaaaagattagcctctatacaaggtcaggtctaagtgatgaacaaacaaaaggaccagccaagtcttacataatcatgccaaggtgattgctgactaataatacgggcagcctggaggtaactacgctgtacagaagtggccattctagtcctaagttctccccatctaacatgctaaaccgaaaatcctctctttctgaaatgtagtgcagctatatggtggtctgggtttccccactgtagtatgttcataaagtcttatccccccgtggtctcatttacaagatcccgcatagtagggcgtctcgcatatgggaaacaacatcttctcgttgaaaatagacaggggcatgcgaattcaacctggtctcaactatcccctagctaggcttgttcaaaatagcttttcttccgcagcttctttataataccactgactttattccagccttcagagatgatctggagatgaccttcctccagagtcgagggtgtgtcgacaggcactcgcatgaaggccctagtgtgggttaaagactaaagtcttgttctaggagatcagagtggctcactgaatcaacgggtctctttgtgtcgcccacgtaacaatctggattgtaacctgccacgggcgagccgtaatagccgcttcccagtcgagagacccagcttcgacggtggagatggtctgctcttgtttcctaagcttggtcaacggtgttattactcctgagagatctttaacgcttacaccgggttgcctattgagtaaagttgaaatgacattgaaccatcgagttcgaatgattgcccaatcactctgatactgtcttttgatccatcttctagtgtgatttctggtgtgtccacgtggactaacaatcgtataaactgggttgaggtgtagaggccatctaaggtgagactcgcaccagctaatgaccgtcaggttacggaacagccctggtgtgttggaggattacgcaccaatctcttcgtttctcaacaggcccaacagaattcgaccaatgtatattgtttggagccccataaacgatggcgctgtgaggcgtggatctttcacgattgaaccaagcttgtcactttttatcacctcaaggcacggttcgcgtatcctctcctctcgctggtcttctgtctcgcttcgtatctcctttggatctaattgaacttgcccatggtagaggaccacagaaatgtctgccggtgtaagatattttatcacctgcctgtaatatgaagtggtggcccattccttactgaaaaaggcttccacttgtactccgggtaacattggtggcatttggtactggagactgcagatgaaactgatgtgtaatggaattcagtaataactaggaaagagcagcgaagagaaaaggagacagagggagcaggttggggaatttataataaaacggaagtaggcttcttcctaatgtgggtgtcaccgttcttcccctgcaagccaaagccatatggggctatgccctctctaccagggagtaaatattggttaaaccaatgagcagtagaagcgaattcagattggggatttttcactggcttgcaagggtgacggggccagcgaattacgcgctgggaatgcagctgcacttcagtactctcccgcagatcatggtttcttttttccccttctgcctcctcctttttcttcatttgttattgcgtacagctcacagaaaaactcccagtgagagggttgaatgatagaaaaggccagcctagtctcccgtacacctctgccgattcctccagcggaaaccatctcagggcgaggacgatacacaatcgaacgcttccgagctaccacatacccttcggcattagtgtgcacatttcctaacatcgagatccgacccgtggtagaaaggagccattcggagactatgccgagaaagctcgtggggtcttaactctcaagctagtcgtcaaaatgtcttgatgtatatgtatgtgactgtagatttcgaagggtcctcatagaaacaatagagagtatactggaatgtccgcagcattaatgctaatacatagacgcaagattatatctcatgaatcgtcgcaatctgttacatgttaccttgaccgtcatgattgaccagggttatccgactccagcgcttgttgcgtcctggttgttgcttcctgcataggcccatgagctagatttgctttttgaaggaggtcaaagcgaaaattgggaggattagacgaagctttacactcaaagttggtaagatatggtttatcccatatgtacagattactccaattacatgtgatagatagccttacgtatcatttcgatggaggggtgaaagaatagggaaaatgggatggaactctcccaaacccaagtccaacccatgaatgcctaacttatcacctgctcttcgacccctgtctcctaccccacccttggaatctacgcaaatggcaaacctcaatctctcaagttatcatcaacctatgttccttgtggcatcaaaccaaagctccttcgacacgttatcctgtttgccaagccgacttaccacgttatatttcacacaaaatcgttgcaaccccaacctatcaccacctagctgagttggagctactgctgttcaatacccttcttctcgagcaatgattctcactgatacttatagcaggtgtctatgctcgtatttgaactgactactacgacaataacgaaagaagtcttaccatcaccccctagtcttacgatcgacatctcctttcccgacattgcgatgaagtggttctcttctctgcgggcaatgatatttggagtacaaaggaacccgtggagtcttcaaaggacatttcagcgacggtctagtctgtaagggctatttttgcgtcaaccaaacgacgtctgcactatagttgtgtcgcagcctactcaaagctcaatgataaaatctcttcacctttacacatctcattgtatcaatccattttctttctctcatttcggagatcgtagatcagttgtgatctccgactcttgcacaacctttagattagtacttgaaattatcctgtacatgcttttcacccttgtatttacccaaatatgcgcctcatcttttgaggatctagtagcatgctcaagacaccagccattgacaattgggttgggtgatgtattggaggtacgcactcgagttccatcaattatattcctacacgcgaatagtgcggtgatagaagaagtcactatatgtacccttcgaaatatgtttttctatgccgactacctattgaagttgcgtccctagatataactctaaatggtggggccatagaggctcctaggctaaacctgaaagagcatattctttgggggctaaaataattgatctagtcatttcatgcttacaatttccttactgtaagttattctgcgagaacatcaggctcagaagtatggatatcccgtttttcgtgtaccgaaagtggtttcactcttcgtagattcatccagaccttttgatgatatgacggtgtatttaaacatatatgacgggggaatctccaagactaactgcttcgaggacacagccaagcagattttcctggatcttggatcgaactatgcatactcccaaacataggttcggacaattatgatcttgattaaacagcttatcttacaaatttcataggccattgagaaggggtgctgctatcatctataacggagcagaaatccttgtccagggtgactatccaggcctgattagggaagcatacatcgccacagacagtatctcatacttctatgtgatagacaattggtaaactagggctagtaactaactaaccagagattgatttagtcaattcatgtagcattcgtccatttgcatttttttgcggcattttagttgaactaaactcgatatagttactgttgtgtcgctcattcattcaactagatagccgctattggggtgttttagtactgataacttgtcattcattcgagtgagcatggtagtctcggtaatttctcgctggttcctgtctggtggtgtaagtaacataaatagagtaagaaaggccaatgtgaagtatggattcctaacacttttatatataactcgacccgagagagtttaagagttcggattgatttacaaactgaattgacacactaataatccgcatatgatcgcgagatgctccggtcctcgggatctatctaagcccttataataaaccgtggtgacactgagatcccatcaaacctggggaactcccagtgtgctagcaacccgggatctgattggcgcccgtgggccctgaagattggccctggtggcggccctatggggggcacggcatgccccacgggccaagtcgacgggacccaacgggcagtgccaagacttccagggaaccacatgggaggtgagtgggctgtgagtggcccagacatcgggggacgacgagctactgcaggaacccaattgcccttagagttggatcggagtggatttgcagtcaattgggtttggtcggtgctgctttcggatgatcgactgttcagtccaaatggctacagtggtccatgtacaagctactttcttcatgcccgttggtatacctgcaggtcatgtctagtgtaccttcgcttgcccctccactctctcttatcaatgcaccccccatgtgttgctgtgatagaacgtgctacacgttgccgtcttcccgtgggaggggtcaattagagccgattcgctttatatttcaatctctcggtcgcttctcttgctcttcgttgaatcgctctgaatattgaacatggattggatgcacgtctacattgtcggggcagccctactggtattcgccctagtcggcttagttcttctcgtctcctctcagcacatcaaggttgccaacactggtgctggaccttacttgaaattcatctgggcgaacttcctcaaaccccatgataagaaggctggaggccagcaagatgcgttggagagcttttacaagactcaggttcgatcgagtgtgtgcttcgatatggctctaagctgaccgtgttaggccgcaatttacgatgccactcgtcgtcgtctgctctgtggtcgagaggatatgcttggcctggtggctgcacagctgaagtacaaggtcggcaataaagaagtcaaggctggaaaggctgtctgggtggatgtaagtattggattgctattttccgagctagcgctaatcgattccaggtcggtggcggtactgggtaggcacgaaagaaaccccgaggtgatacagaacatctaactcgcgatagatacaacatcgaagccatggcggcctttcttccggtggacaagttcttcaaacatgtttatctggtcgacctctccccgtccctctgcgaagttgcccgcaaccgcttcgagcgtcttgggtggaagaacgttactgttctctgccaggatgcccggtcattccagcttcccgggaagaacttcgatttgcagtctacaaatgcagcaagtgatggcgtggacttgatcactatgagctacagtctatcaatgatccctggtgagtatttaagatccacgcaagactattgatattgactttttagactattacagcgtggtggactcattaacctcccgcctgaaatcaactggaatgttgggtgtgtgtgacttttacggtaagtaatacctcgaggcttagcatgaatgtcactcattcagtatagtccagagcattgtcgatgtgtcctgtcgcaactatactggcggcgctttcaaccgccatgtcaactggcttgggcgtgtattctggagagcctggtttgatttcgaccgggtcagtctggaagctgcccgccgagactatctggaatacaagtttggtactgtcatctctgccagcgaacgaaactatttcctcggtggtattccctactacatatttgtcggctgtccaaaggagatggcatctactccatcaagtcaatccattgagaggctggatgcatcttttactgaatctccttacctgcttcctgccaatcacaagcaggagatggataacgcagtggtgaaaagcacacatgagattcgctccaaagcatatgagtctgcggtgattaacctgagtgccaatctgcctcttccgtcgtccttttaccagaaccaccactatcgcatttattacaacgacatgctacccaaacttactcaattccagaacgaatatatctacgcgttcacatgggaagacccgcgagttgaccaccgcctcctgaacatcggtaaagacgacgtgatcctcgcgatcaccagcgctggtgacaacatccttgattatctgcaaaagagcccccgccgggtgcacgcagtggacttgaaccctaaccagaaccatcttctcgagctgaaggtcgcctgttattcggcgttgggccaccgggatatgtggaaaatcttcggtgatggcaagcacgcacagttccgtgaactactaatctctaagctcagccctcacttgtccagccaggcattccagtactggctcgagcacacccagatcttcacctctacctctagccatggtctgtacgagaccggtggatctcgccacgccatccgtatggtgcgatggcttttcaatatcttcggactccagggtgaagttcgcaagctgtgtgaagcgcagagtctcgcagagcagcgcgaaatatggcctcgcattcgacgtgtgctaatgagcagaccactccactgggcggttgtgagcaccgaatggtttgcctggaaggctgctggagtaccacgcaaccaaagaaatatgattgtcgacgacttcttccgccgcaacggcttgacggaagatatgaaaaatggaaaggacgtcagcggccaatcgatttgggaatatgttgtcaatactctcgaccctgtgatcaacgatactttgatcagcaacgataactatttctacttcctttgcgcccagggaaaattctcacgaaggttcgttttctcttatatatatctcgactacacgtgctaactgcaattacagatgccaccccacctatctctctcctcaagcacacgtcaggctttccacacctggtgcatttgatggccttcgcatccacaccgatgagatcaacgaggtgatcaaccgtatcactccaggaactctgactatcgccgtggtaagtatcaaaatagcactcaacgggctttccatactaaccttgcaccagataatggactcaatggactggttcgatcccgcagaggactcagcccctgcccaagctcgaactttcaacaaagccttgaagaagggcggtcgcatcctcctccgttccgccagtatcaacccttggtacatcaagcactttgaggaaaacggcttctctgctcgtcgagtgggagctcgtttcccaggtacatgtattgatcggtgagtttcggtatttggttcttgattacgttacggacgaagcttatacatattttctagggtgaatatgtacgcatcaacctggatctgtactaaaactgaggacttgtcacgcccgaatacagatcgcaaaatgtcgactctatcgttgggggaaagtgctatgattgcaggcaagatgccgagcagtgtggagagtctgttgatttaaattggcgataattgttttcccttgatgttgcctgttcatgatacctatgatctggagttaggtggagttagatagagtgtttcgtatgcttgccttcaaaagcgcaggggtcaggagtatgatactatatgaaataaccacaaaatacatatatttgtcgatcttacatacataaacgttcatgatttcaacgactattaagccaaggatccttcaaaagctcagaggcagattgcctatcatctggatctcactgcaacatttttcgcataaattgcaggaaaagacgcctattttcaccttcaagatatacctccgaatcctctaacgataattcagggacactgacttgtcccttccattgacctgtgtatattttagacatgcccaaacggttttggttacggaagggagactagaacaccaaattgatcccaatacctttgacctcgaagacaatgcattggtgcttgcctttgggaccttctatttcgaaagaatcgagcatggtacgaataagaccattcacattgtgtctcgtttgtagctccgaaaaccgacttagaacttcgacttctcgattctttttccagtcgtgaatgaagattttcagggcaatatagcgatgtttcctaggctcggtttagtaagatagcaaacagtgcacgcggaaagctactgtaatttactcgatgtcacggcagagccaaagggttgaattcgctccaaagcccaatttgctgataacttggtacctagtctggaatgtatccccaaaccgaacaggatagaagaggcctatatcataagcaggcattcgctcctcttcaacctttttggtcggatagctcgatagggggatggatttcggcaccagaaggcgcgaccgaatccaaataaaagatgcttcaacgaaatcgggttgactattcggatttcaatgagaaagagacggctgattccgaactcgtagacgaaaaaagatggtcaagcaagaagacctggaaggaaggggccttgttattatgagagcatcgggtagtggcatcgattctctcaccgttctgtatgtaagcgacgcgactgggggtagcccctgtatgttgtacgctgaaggcttaagcgacaactagaatatatcaggaggcactgaaattatacagactaacggtttaatttgcggtactgtatatattgattctattcaagaggtcgaaagctaactaaatacgtatctctggctgtagactcataaccagagtggtagccctcgccaattccagtccaccgcaacctatcctactagttttcggcagaatgcgaaagattgcacagtaaaatgagtaagagggagacataaacaccagagcaaactcgtctagaaagccagttgatagtatctatggatatactaaggaaaatcaagcttaaaatctgccccattccgaaccttaggtattaaatcacggggccccacaactccgcaagtcacgaatatattatggagctgcttaggtacggcgtcgatccttagagagggttctagcggccgatcttcaggcgttgatttgagcacatttgcgaaagtagtctccatagtcaatagcctcttcccgcaagtcttagtatttactcgatgaatagatccaatattctctccattttcgggtcccatagacattggcacaatttatttttggacttggctatatctaaaccagcaaaccaaagatatgccattcgactcccaaggttgtaaatggtcttggtaagatatctcagatatctcctgtctggatctatagcaaatggtagacaaacatactgacggaccctgaaacagtgaatcctgtattcgaggacaccgctcgtccaaatgtgcacactatgaccgaccgatgaagagaatccctaaggttggacgtccgttagcaaagtgctcacacgtcaatggggctgattgcagttgtcaggaggcttgggcgattatggttcgtcttgctccaggtacgtcatgtcatgccggagatttgggttagagatatatttgtagtaacgtttgtcggtttgaataggatcgatggtttgcagaccagaatctgagactcagccggtacagcagcagcaggtcgatcatgtttatgctgagggtatatgattatttttatcaatgagcatccttgttttataaaggaattaggcaaataatgaagtatagatgatattgtcattctaggatcaatagctctaattaggtatttcaccaagccccctttgtgagtcaccacacagcgctacgcagtgcgaggtaaagggagctaagccagaacttcaccgcaatcgaaactccaatcatccaccatgacaagtcccttcctgccagccagggattccctgagagaatcttccaagaagcagttcgcccaccaggacgccgaaaagcacagcaacgaagacgccgacgttgaaggtcatcacggatagcatcctaccaatgccaataattaacgattatccaataagtactaagtatacagacagccgcagatggaacaactcacaagaaatatccaatcaaagccctagcacactcaagcaatgcacgtgtcccgtctttccacagactccaggttccactggccttccaggatgggaccaggcgtttcagggagaacctattccgagggctatcctttatgagatattccattgacgtgctttgtgtttcattgtcattgttcgagactggcaaattctcctcatcggggtcctcgtcctcgtgcacgcgcatgtagttcggaagaggactgagctttgcttttcggacgccttttcgtggatttactgaggcgagaagcagagttggagggggagaggtatgctgggaccatgatttctcaagttggaatttcagggcgccaagagagcggttgaagatggcgaggaggaatagaaaggtcaatgtgaagacatattgcgtcgtggttgaggttgtccagccagtgaagaggattgtaatttcagtggaggtcgagaacactgctggcatgttcatacccatgttcatgttcgcgctaggatgttccctccagtgcgaatgagagtcagagtcttaaggcagagttcacagtgttgtattactccatgttgaggatggtgagagtgggaagcctacaggcaacaggcaacagacgagacgagaagattagacattcctctttgctctagcggcatacaagcgcaaatccgctcatctccacatgagatgtctcaaacgagttagcttctcgtttgataaaccataaaaagaatgattgtaataagaaaaaatatatatttcaagttagtttattcattgacttcaggtctaatcatatttcacaggggaagaagactggaacacgccaaagcagcggccctctaagcaagtagtgattaaaaaagagtctgggaaaattcataaatggactaccatgagtcccgtgctttcacctcttatcatatcatgcccgtctgttgctcaccaagccaaagtgcgcatacagataaatgatatgcacatgcgaacgatcgtggatatagagtcagagacagaaaaaaaagcccagagaccgaaactctcatgaacggccataccgcgtctttccgaaggagaaaggcacgtaacggtacttaatcatatgctggatttgtcgtcgcactggaaaaggggtcaagttagacagatgtccatataaaaatgctataggtatcggagcgaattccgaccaaagggcaaacatactcgtcagcacaaacagaatgatccagtaaatgaccagcaccggccagaagacggggatatcgaagacagcgagccaggagcaaacgaagccaatggcgatggcgcgagtggccgagtgccagaacttgaactcaggcagacgtcggatgaagggacgaaactcctcgtccttcttggtagggaggctgggggacccggcgtcaccgtcctcaagaccctcgtcctgggtgagagaggggtcgaacttgggagtcaggaaagcgaggaagaggttcaggaggtaaattccgagtgtataggcgactgtgattcaagatcccagcgttagcggtttgtttatgcagatgtttacagcaccgcggatgaatggctcccgcgcgttggggttgaagcgcatcattttcgctttgctgattccatttataggggttcgatagagccataccgatgtaccagccctgcgcgaggaaaatgcgcaggaagaagaggcacaggagcacaccagaaccaacccagcggtaggttgtgtacggagtcgaggcatcgaggtaggcttgatagtgctgcgatcggcgtattagcatgctggtcggaccattcggctgatctcaggaatgaagaatcgaaagacatcgcgcaatgcctttgcccctcatgggacactcactcgagtcagtcgagaggtgtgcgccgacacggctgtgaagggagactgatcgggctcagggacatccatgatgaagatattagggagaagaagcaaagcacagggctggaccactgaaagaaagaaatgaaagagggaagcaaaagaaaagctgtgattaagataagctgctgaaaccagacattccaggtcaggcactgcacttccttcaggacagagaagtgtccactgcccacgggccaatcagcttagatgcgaatcactagccatcccagtgcacgtgatatgtggcgaagtccaagatgtggcggtgccgtgacataaggcagacgaaaagggcttagcccaattcgaatggacctcgggacggttaacttcggcggttaattttggcggcgttcagtcggtcgcggggaaaccgaccatctatgatgtatcgcgtcggtagtctctctcccttctctgcattaatttaacctcaattgtctgaacagaagtaattatatttttcttcacgtatcaaaatgtttgctcgtcaatgcactcgtctggccactgctcggacatcggtccccttgacttcctacctagcccgagtccggggttattcttcagccgctggtagttacgagcacatcctcacttcggttcccaagcccggcgtgggattgagtatgtacaatcagtcaatataatgccggccacttctcattgctattatagttacccttaaccgccccaaggccctcaacgcactattcactcccttgttcaaggagcttaacgaagccctgaccaactatgacaatgacaagagcatcggcgcgatcattattacaggaagcgagaaggcctttgccggtatgtacatgtcctatttacacttttcacatcctatcctctcccatcatgcctcgccctaatcctaaagtacgtcaacaatactaatccaacaaacccaccatagccggcgccgacatcaaagaaatggcccctctaagcttctccaaggccttcagcgagaacttcatcgcgccctggtcccacctcgccacctccatccgcaccccagtcatcgccgctgtctccggctacgccctcggcggcggctgcgagctagccctgatgtgcgacatcctgtactgcaccgagaccgccaccttcggccagcccgaaatcaagctgggcacaatccccggcgcaggtggatctcagcgtctgacccgtgcggtcggcaagagcaaggccatggagcttatcctcactggaaagatgttcagtggtaaggaggctggtgagtggggcgtcgcagccaaggtcgtgccgggtggtaaggaggagctgcttgagcaagcctacaagacggccgaggctattgccagccatagccgtgtggctgttgtcgctgctaaggaggttgtcaataagagccaggacttgccgctcaaggagggtattgagtatgagagacggttgttccatgcgctctttgggagcaaggatcagaagattggtgagttggcacttcggtttgctgagtgagtgggtttgctaacggttattctaggtatgactgcctttgcggaaaagaagaagcccgagtggtccaacgaatagatgacaaagtcatttggaatgaagaagctggtttttttcatcgcttgcgtgtaattcacgctgaagctgtagaacagaggattagttataagacatagaacagtatcatttaactcgcttgtgcctgtaactctcgactgcaatctcatatagctgggtgcctcatccacgttcgtctcatcttccaaattggcattgccggttgttccgtgattttacttggtcgaggcatactaatacgaaaggtcatatgtcagattgagggtcgagaattgccattgatgtaagagtggaatccggactaacgccaggtgcccatgaatatgcaggcaatgggctcttcagtgctaaaaaaagaagtggagatatataagaaactgcagtggtttacatcaggagcagtgtgactttattttgtttgatcatcatggaaagatattagattactactgctattctatttgctgaaaaatgctatatacatagggggcctatcaagttcgggcccagaagcagaattaatcgtaaacataagatacatcgcatcatatcgaaccgtgatttttctccaattcgcattcatcggttcgggtgtttttatttgcccggtaatcatcaatgacttggctctcaatggtctcatcaaacacatccacttgggtggtcgcaaacttgcgagcgctgacaccgcgctcgaagagcaggtcaagctcggcgaacgtgcggccacgaggctcgggaacgcggaagtacgtgtatatgatgcacaggaagcagatgccaccccagaagaaaccggcgtagttgccccagttccaggcgccggggttcagcatgtaaggggtcagaacgccgcagacgatggcgacaatgttgtacaggttgcggcccagcacgactgtcttgatttgcagtcggcgggtggaaagctcggcaacaagggagaagcagaccgttccaacggtcagctggtagaatagggcccagatcaacatcattgaaccagtggccagggagccttggtctctgtgttctttgggaacaaggccaaggaaacccatgaccaatagcatggtgcacagaccacagagaccgtacagacataacgtccgccggccgattccgagtgtcataaggaaccatgatccgaaaacgccaaccatattgattccgtattgacccatagcaaagttgtaagagttagaggagtctaaccctgcctgttttaagaagtaggtcgagtagttggaaaaggagtttccactgagattttggatggcccagaccatacagacaatctctgtgcggcggagatcagtgccccggaagcaatccaagtagctcgcaccctgggtgattttttcctccagggcggtcgtatgaaccatcatagcgacagtctcatctggatcgaaatccccatcctgtccctgacttttggtagtcaaacggagaagggcccgtttcgcatcttcagtgcggcctttccgaaccaaccaccatggggattcaggcgcaagccaaataccaacgaagagcggcagtggccacatccactgcagtccgtacggaatccgatatgcccattcgtcctcccggttcaacatgcccttaatcacaccgataccgataagctggccaagaccccagcagaaattgacataggtcgtcaaataccctcgcagcgccactggacacacctccgaagcataggtgatcgtcaaagtctgaaagacaccccaaggaataccgcagagaatctccgctgcaagcagggcatgcacattcttagccgtgaagaagatcgccgtccacgcactaacaagtacaaggcaggacataatcgtgtaccggtaaccgaatcgttctgaagcccagccgttgatgaatagaccgatgatctcgccgcagtaagcaccgttgctcagacctgcttgccactttatgtccagagaattgtcagtttcttcatctcccaaagaggcaagtccaccccactccaagagatagaggaatggctaccgccggaattggttgaacttaccgcagcggatacttgatatgtgccatcggccagcatctcaccatatttgcgattgaattgcgggaaggcgtagaagttgttgaccaaactaatatcgtaaccctccatggcaatgcaagtagagatgagcacgctccaaaaaacggctttggggtacaaccggataccctgtatcaatgtcatagaccgttccttctccgtggctgcctttgcattttgaatgaccttggtcgtggatgagtccgagcccggtccagcggctgaagagtaaccatattcgggaaagacatccaccggcgtgatggcatctgagaccttgggttcggccatgttggatggacgaaataaccgagatcgctgggaggaatggaaggttggctcgagcaacttgcgatatgggtttgagagttggcccggttcggaagtcaggggaataaaaaatcaaagtacccactatgccaggaacattgcacgcaggcactccacggcagcgaaaagtttccttgacgcctaccgagggtaagtgaatacggcagagacaaaggagcttgacaaaaagaggataaaagccaatggtccgaattggcgggggaacgggggatttgacgggcttgatcgcctccaagcgcaaattttggcgggatgagaagcttggcggtgcccggatggggcaagcgatgggtcatcgtccgaacataattcgatattcgagtcgtgctatgttcgggcttgattggtctagtattttctgatcatacagtcttgaaattatactaacagtacattttagatgtaactagatgtagtatgactcatgagtctgacaaccccacgtgggggaactataaattccccttgcagtaatcagaatgttctatatcaaacttctagtagtattcttattattttatatatcccataccgggttcagtatgtatctcattggcaataattagccaaatattgatctactttcaggacctgcaaatcctaaacttaagcttctctactgtaaaccgcggacctgtgaattactgtattgagttagttttgcctctctgggtttagcgccccaatacaccgtcacgtaacctcccctcaatgccctccgatatacataaaagaccaccgaaagtcaggaagcaggcaaggcaatgggcgaatggggagtgcgcatgaattacagtacgggtccttcgtatgccaatctgattgccccgagatggctcaccgacctgtcggacttttaagccccgatgtccgactatcagatcggtggccgagaacatacgtgccgatatgatgatgtataaatttagcgatgtgccaaacaaaaagcctatacaattttgttctcccaaagacatacgttaacagcccttgctctgatctcagcttctccctttcttattgcacaactgccatgtctcatcctatcttgattatcggtgctgggcttggcggtctttgcttggctcagggactgaaaaaacgaaacattcctttcaaactatttgaacaggacggaaggcatgatcttcgaactcagggatatagattgagggtgggaagtgagggtatctacgcccttcgggataatctgtcgcctgagctatatgctctgttcgagaacacctgtgccgaaacggtaatggggggcgtgagaatcaaacccgatggtacactactaggcggcactggccctcctaggccccttgggtcggctgcttttatcgagccccagactgtggatcggagcactttccgtgaggttctgctgacaggtttggatgagcatgtgttttttggaaagagcttcgaccattacactgtgaacgacggaaacacaattgcattctttgcggatggctcgaaggaaactggatctctccttgttggtgcagatggagttcgatctagggtccgcaagcagtacataccagatttcatgggtatcgacaccggcatgcgcatcatctttggaaagacacccttgagccccgaatttctggctcggtttcccgaggcgtaccaccatggaatgtctcttgttttaaacccagacgatgaatcacggaccaccttgctatttgaatccatccgtttcccacacgcagaaaaagtctcgaaacctcagcttcccgacccatacgtgtattgggtgcttgtcactcattcctccaatatctcgtcgtcaaatggcacatcctggccattaagcccggaaaagtcagcggaacttgctcgacatgttaccaagtcatggcatcctgacttgcaggtgcttttcgagatgcaagacgaggctcaaacttcaacccgattgatgctttctgcctcaccagagttggcctcctgggagccctcgccccatgtgactttactcggcgacgcgattcatcccatgccaccaactggagcgatgggggccaacactgccttgcgtgacgctgcagatctggctcgcaggcttgaggttgcagtaagttcgcaaaccctcggtcgacatgtcatcggggagtatgaatcggagctacgggattcggctagaacggcaatcgcattaagctggcaaggtggcatgaaaggcttcaggctcaaatcagccgtggaatgcaagaagatcctcttatgatttcgctttagctagtattgaacttctctcacctctctgaactcctagctgttccctctttattgaatgtattgttaaggtatcatgccgccaaaacgaatcttcctcggtgtcatttttaatctcccgattattggctgctactcatcactctatgcggtagtgggtataggtcggccggtcctggttatagactcttccatcctcctatttggacagtttgagctatggtttggggtggccggctggcttgtgaaatagttaacgtaaaacgcggacctgtgaattactgtatccggttagttttgcctttttgggtttagcgccctaatacaccgtcatataacctccctcatgccctccgacatatgtaaaagacccgtcttcgctactcatcctcccctgacagcctgacaccgctaggtaatgcaaaccctgcaaacacttcaagacttgagtatctcgcttgtttcgtcgtgcagtcccttacgtacatataaatgcgtgtatcagaatgtctgccaaactacctctgatcaatttgaacaaacctgtatcatccactctggcctctgacctgaagcttgcccttcgtcggttcggagctttccgcctagtagtagcccctgaaaccaggcaacactgtcccgacgttgtcattgaaaaggcaggctaaacccactttcctggaatagcattcatcactgaccgcactcctcaggcacgggagttcttcacacaaccgattacagctaagacagacataaaaggatactctccttttgcttcggaacgtgttcgcggccgggctgagatacccaaagagagtatctattttttccgacatggcgccgaaccgaaccatctcaaggggccctcttgcaacttatatcgttcagtcaaatctcttcatgaggtaaaccgtccttgtcttctccctctttttctgtatcgtgctgattttcctttcaaggggtggacacctataaggctgcaattgttaaagaccatatcgcaggcactggactcggacacttccctaactggtactacgcttctcgattctgctactatcgggatacactattatgattctcgaagtcttcctgactttagcgcccatttcagtccccctcatatggatagcggaacattaaccattctattccggtctcataatgagaacgacggcctagaaattgctgatctcgaaacaacagagaaacaagacagtgaaggggttgggtcggaggcatcttttatgcacgttcctacttttggcgacgatgcccctgaggttgtcgtctttgcaggcactagactacagcgtttactcggacgcgaccgagttcgagcttgcgtgcatagagtccgcggaccaggcccggaggcgcacaataactctggtgtacaacgattgagcatcgcaatgttttgcgctccatctgggccatcaacctcaccgccctcatagttcataaatcgtattttaagttgatgagatatctagatgcagcgacgtagagtgaatccacgattattttgagtataagagcacaagcaagcaaaagtacatctacaaacgtgctggcggggcaccagtaatatgagcatccgtagaagactggatacgagcaccaagatctgcgttaacacgacggaacatctcgtaagtagcctttcgaacacgctcgtcagcgccgcacagatgaccagagatgttaccgacaaagttctcctgctggccaggggtacggccaaggacctgccataggccgttagcctggacgtagtcctcggaggtcacagggtactgctcggcgatgacagcaccagaccatttctcgtgttcctggctagccttgacgggcttgtaggcgagcggacggaaagtagaagggtagttggggttggcaccgtagttgccgttgacgttcatgtagccatcgcggtgtgaggggttgaaggctttgagtgggcagtttacggggatctgctcgtagttgccgcccaggcggtggcggtgcgtgtcggggtaagagaagaggcgggactgaaggacagggtcggcggagggctcgacaccagggaccatgtgggagggggagaaggcggcttgttcgatctccgcgaagtagttctgcggattcttgttcagggtgaagcggccgaaacggcgcagaggcacctcattctggggccagactttggtcaaatcgaagacgttccagcggaacttttcggccttttcggggctcaggacttgtacgtagcaggtccaagacggattctcgccgcgctggatggcctcaaataggtcctgggtgtgccagtcggggttctcggcggacagcttggtcgcctcatcgttggtcaaggttttgttgccctgatcagacttgcaatgaatctggacgtagttgaaggtgccgtctggcttgatccacttgtaggtgtggccggagtagccattcatgtgacggtatgagtatggggtaccgcggtcactgaacaggtgcataacctggtggacggactcatggtgggtggagaggtaatcccagaacatggtggcatccttgaggtttgtctgtgggttgcgcttttgagtgtggatgaagatggggaatttagcaggatcgcgcaggaagaaaactggggtgttgttgaacacccaatcccagttgccctcctcggtgtagaacttcatggcgaatccgcgagggtcacgggcactgtccggggatcccttctcaccaccgacggtcgagaagcgggtgagcatcttggtcttcttgccgacacccttgagcatatcaatggtcgtctatgcgttattagcctagtattctctggggaagtatagaaactgcctacatacgagatcgctaatgtcatcagtgacctcaaactctccgtaggcgccagcacctttggcgtgaact
